United States Patent Application Publication US 2024/0065297 A1 - sequence listing, part 3

SEQ ID NO: 6 - DNA, 2991295 bp, Pichia kluyveri (residues 1-1,495,648 of 2,991,295)
  >Nicaragua_Y298_000000F_chromosome
tcactataccccccctgcgacctacttcactatacccccctgcgacctacttcactataccccccctgcgacctacttcactataccccccctgcgacctacttcactatacccccctgcgacctacttcactataccccccctgcgacctacttcactataccccccctgcgacctacttcactataccccccctgcgacctacttcactataccccccctgcgacctacttcactataccccccctgcgacctacttcactataccccccctgcgacctacttcactataccccccctgcgacctacttcactataccccccctgcgacctacttcactatacccccctgcgacctacttcactatacccccctgcgacctacttcactataccccccctgcgacctacttcactataccccctgcgatctacttcactataccccccctgcgacctacttcactataccccccctgcgacctacttcactataccccccctgcgacctacttcactataccccccctgcgacctacttcactataccccccctgcgacctacttcactacttcactataccccccctgcgacctacctcacttcactacttcactatacccccccctgcgatctacttcactataccccccctacttcactacttcacttacttcacatctacttcactacttcactataccccccctgcgatctacttcactataccccccctacttcactacttcactatacccccccctacttcactataccccccctgcgacctacttcactataccccccctgcgacctacttcactacttcactataccccccctgcgacctacttcactatacttcactataccccccctgcgacctacttcactacttcactataccccccctgcgacctacttcactataccccccctgcgacctacttcacatctacttcactacttcactacttcactacttcactatacttcacatctacttcactacttcacttcactataccccccctgcgacctacttcactataccccccctacttcactataccccccctgcgacctacttcactacttcactacttcactataccccccctacttcacttcactataccccccctacttcacagatctacttcactataccccccctacttcactacttcactacttcacactcacaacatccatacaaacccaccctactcttacagaacacaaataccattacacatggtccatcttcctatcatcttaacttgccactacaaagagaagttgagccactaactagattacgtaacttttataataattttttcaaattcacatagtaaattatcctaagataagacatttaacttgtataatattgaaccacctgtaactctacgaacacaccacatgtttactatcttagacactactactactaaacagacacaggagaacacaaccatgtatctaactacaagaaacaacccttctacataccaaactacacccccctcctctacgtacttaggggtctatatctcgacaaccagaccacttagagactaatgaagtagacagttttcatctactcatcaaccccattacaaccaaccatctacataccatctaactactctacagcaatatctggccaagtcgcatgaaacacgccatttggaacctgtcagaaaatgcgacttggcaatgcgacttggcatcctcatacaaatttgggaaattttttttgccaattcgctgactttcttagtcttttcttaaatgccatataacgttaaatagccgagcaaggtctactttttccaaaatgctttaaccaactatggattcagacactcgtacacagtgaagtggggatataattttttttagtgtttctgtctatgggaacatgttctcctgtattttttatacatagtatgagtggaaaaagaaaagaaaataagccgtagagggagtaacagccagagataagaaaatcagataagcattttcggacttcggagtagctatctcgacaacgagccgcctttctggcattgttaaacctgttacaccataagtggaccctgacaatgcacccatgcattagaaagaagccaaaaggggtctactaaagaacatagtaattaacactaaaacagtaaaatgacatcatcccgtatctccacaaccagacaatatttccactatgtaaaatttatttaccatacaactgactatggagaacacatacaagctttaaaaagcaagaaattagctgtggtacataatagccatgatttggcggctcagctctctgcgacagatttcagtgttgctcacttaggggggtgtatctcgacaaccagaccacttacagactaaccactcacatagttttgttcgccgtgtcaaactgagtcagaccagtaacagcacaaccaattatcttctgacattttacaaaagttatttttgaaaatacaatattttgacaaaaagtcaagtaagacatgaaaaaataaaaaataaatacttcgcactactaaaatttccattcggttgaaaaaaaacgagaaggacctgtaaaaaaaaaccgaatgtcaaaacgagatggcccgcgctagaaaaacaaaaatcataactacgtccattccgtccgttttcttagggtttttacattatacactatatggtgaattatagaaacagactacaatcatagattatgtaatcacattgaattcagatgcacttattatgtaatcatttaagaaattttcgcacttacttactatgtattatattgtatattagaagatcataaaaaagtatcccccaaaaaaacgagaaggacctgtaaaaaaaaaccgaatgtcaaaacgagatggcccgcgctagaaaaacaaaaatcatgactacgtccattccgtccgttttcttaatgtttttacattatacactataaggtgaactgcgcgacagagtaaattttctgaacaggtttaggaaaaaatataattatattaaaaccacgcgacattctaaaattttatcatatacaacacaaatatatgtcataaaacatacttatacactatactgtccgaattagaagatattaatgctaattcaattaatttattaataatatgattaaatacataccttatctcatgtattgaaacataaaatatattgttatcagtcattaaaagaaagaaaatacaaattattaaattttctaatttttttataaactttttcatagaatattttaaatattatcaacctttctacaagctctgagtacattttaataaattaaaataaaaacgttaagaaatgagcaaacaacagttaaaaaggagcaatagacatcaaaatttagtattgctcgcaaatcagaaaagaaattattagtcaacgttggaattcttagtaaaagtaccaggaagaaatccaaggtttgttaatatctcttttatgttgttattgtatatactttaacttaattttatatattatatagtttgttcttttaataactgttgctgtcataaatatggatcctgtccaaagagtcgttagattacaacaatactaattatttcatactactcataaaattctacataaaaaaccatagaaataatgaaatatctctagtaaagttgtaatcttctactaatatctacttctaggaccaaccaatccttcgtctatataaaaactataaatactatgttatatctaacgatatatgtttataatccatgaactacataacttttatataaatacatacacctatactggatttaaattttatatattgttctaacttaatattcagtgcattttttacttacattatcattttctttgaacttaaatgtcaacattcctatggctcagctgtttatctacccaatatttctttttttaaaatcaaattaaaagaactatttcctaaaacatagatcataattaaggtaagttaatatttactttataacttctcttatacaataaaataaaacagttatataacgatctatgcaacattatttatgtgttttataaataatgatactgtttctccaaatttatcatgtattattaatgaaaatgttaatattttgaaagaacgttgtttggttaatattaactaattaatttagtacacgtccttaaaacaaagtattttgtatttcaacttttattaagcaatccatctctttaatataccaacccctggctctaaataatatgaaattttgttttggtaactatataactttgtgataaatatgtacacccattctaattttatatatccttacataataataaaacaatagttataccaaagcaaccataagttacatgaaatcaaactgaatgctcggctaattaggtataacaaggatttcggctaaagatgattaattttatgcgaggaaattcaaaaatcaaaatttcaaaacttatccgaatattcagaatagccgagacctctgaaatttccaaattaaaaaaaacaattttagccgaaacagcaatggttttttcaaaatgtttttgtctaaacaaaatagggtgctattagttatgttggttaatactgaataattaataactaattttaattgttaaacgtatactttattaagattggatattattctgattggtcaagtattatattctaagaaactgctaagtagtatttaatatttatacgtagtttaaccatcgattttagttatattatttttcgataatgactctcttaaagccttttcttcttcctctactgactgtgataatatattgtgataattcaccagtagttaaaacaaaaagagaggaacatgcttaaatacaatataggtttattataaaaatattaattgctgtaatattaaattaatctgatttagtataagattaaaataaagtcaaatgctaagtaaattaaattcactgacatttctctaacccaattaactgatttagcattagataaaaattaaaatattttatatgaataagtggtaataaaacaattacaaataaaatgattacaaatggtgttttcattacattaaacgaagcacgggaaaattttaatcataaatagattaatttatattatactaaactaattataaaggcataatatttggaattggacctaaaggtgtaattccatgtggattaatttctggatgggactttgtataatgaaatttaatatgttcaaaattagttgtatccttaaaagcattattattccaatataattcttttaaatattgattaatatttggataatcatgtctaatcattttaatattacatttaaaatgttgatgataaacaggatcaaatctaattaatgttgtaaataatctaatatctgcttcattgattaaattgcctaataagaatttttcaccattattatgtctctcttttaataaatcttctaatttatctaaatatttgaaaacatttttaacttctctttcatagggttcttgctttgttgcaaaacctgatttatagacaccattattaatatttggataaatccaatcatttaattcatcaatttgattttttaaactttcaggataaatatcaatcttagcaaatttttcatcaataattgaattaaattcagtatttaacattctaataatttcagaactttcattattaacaattgtctctaatttcttatcccataaaactggaactgtaaatctaccttgataatttggatttgccttaaaatataattctttaattcttttaaaattatataaaggatcaggagttgaatcaattgcttcagttaaaccttcttcctttgttgcaaatctccaaccattattatccatatgccaatgaactacagtaactccgattatatttgttaaaccttttaaaatacgtgtaattaaggtacgatgagcccaaggacatgcatatgagacatataaatgatatctattaggttcaggtttaaatttaccattaattgaaattgtgtctctaaatgatgataccaatctcttgtattcaccatcttcattagcaaatttttgaattacaatcttatctgtcattataatatgttatattatattaatatgtgtatgtgttgtattaattactcaattgtaagtgttgagtattctaaaggcaattgtaagcaattataagtacaaattgcaggtatttatgtaagaaaagggaagtgaagaaggggaagtgtaataaattgttagtaatttatactagtaatctcattaataagctttgttatcactttgatcatttgaagtttttttttgtgaagtatatcagttatttcatatgagtttatatatgatagtagttcttcttatatagatttttatatagatatagagaaatcatcctttactaaggttaaatatgattgtagaagtttaaactaacttatatagtcaaataaacattcttttatcatttatttaaattgttatcagctaatatcacttattagaatatgttagattcagtaatttggtattattaataagtcttgatattactaaaactctttcaattttaaagaatgtttggattgatccgattcaactgtttaactagatatactatgggtatattgttgttattgttaataactgattcattatcagattcttaattcatttaaataaagaaattcaatcatttatattccattagtaataccctataattaaatatcatattcaaatattgttctattttctagtttgaattcattaataaactaacataaccttcaataatttataattcaatgatttctaatttgcctaatcaatgaatatatcagttgcaattgaaattgacattaactaaaatatgatactacattattatgataattcttaactgttctaataatatcctattaattccattattattatactcattcaaatcatatcatcaaaaccttaaatcaatatcaccattatttacacttcattacacttaattatgaatgtatttaaccagttgttaataaaagaaccaatatccactaagaagaacactctgacaatttacatgttgaaaatatttactatgtgaggaaagttctcttaataaattttaattaactgtttcattaactactctttctttatcgatatatctttaaatggtaacataatgcaatatgatgttgtttgtacactgttggttttgattatgtgaagaaaaaggaacgtttatcaggaatattcaacggttactaaataaactgcattcgattgaagttatatcaaactacttgaaatactcaaatagtaatgctgaattatatgcatgatattttaacatcatatctctgattttgcatctattcataatcaaaagtttcataatcaagtgattaaactattttattaataatccaactaaaagagaacaattctaatctttttcaatatgatattgatttacataaattaatagaaacttaattataagcatctaaaaaatttcaacattgaggtaactgacttgtactacaataatgaagtattaatgttaatttgaaatatcaaatagccaactatttacataaatagtatttgtcaatataaataataatttttttatgttatcataatcacctgaatataatatgcatataaagacttttgaggaatttataatacatcttaatatcacaaatacattacatgatcaaattataccccaatatcatcaggctttaatacatttaaggtaatattgttaagtacaataattgaagtctcaaatttgtaaatgtcatattccaattacaaaatgtaaattgatttattcagattattacagtttttataaaaatgatatcaattgtaattacaataaagatggtaaatattaaacattcaataaaaatatttaaatcatttaattagaacaaccttcaacacaatcataataatcattacattgaccatcaacaccaccatatgtatttgtgtaaatttcaccatgaactgcaacttcgatattttccaaatgattagaatcaattggttcaccaggagaaggatcaatattcatatctaaacaccatttccaaccatcattgcttgaaatgaaactctgtgcactgtctgcccaaacttgagtttcatctgaaccttgtgtatccacaaattgttgagctaaattttcattaacattatcataattatatgaaacccaatcaacttgataacctcttttcaaaagacgaaatttaagagaaacatcaggttcacctggaattgctttatccaatctatcaacaaattcagcactagataaatgaggtaatgaaacagctaaatgatgacctaaatgtgtatcaaattttgcaacagtaacatttgaatttaaaattgattcacttcttttatctaatttagaaccaatattaagatcattataggtacctaaaagtaaagttaaatttttaataattggatgtgaagtaattgaatgatcggaataatgagatgtaacattttgcattaattcagtaattggaataatatttgaaccatcacttcttttagtattaccattagttgcacctgaactatcacctaaagctgctaaagttgctgcattgaaagcaatagccatagcaatagaaatccaacatactgctacagttgcagaacaaactgcagctgccacacccatccatccaacagacatacccattaaaactgttgcattaccttgtctgaagatattactaacagaaaatgcagtaacttttgtaacactgtataataaaattgaaataaaaacgattttaactttatccaacttaaacatttttgttgttgttgattctaataaagttttaatgttgtaatattataatattataaaatataaactatatcatttgctttcaaaacttcaaggggaagaatacagttatttatatagttttcctgacttatgataacagacataaccatatatcggttaacttacaaaacaaatgtatactagcaaaatatagttattaataagtagcaatcatattttcaacttaaactttgtaaactttgtaaacatggtacgattactttatttgtattcatagtatctacgccactatcgtgatacaaaagcaagaaaccttaatcaaagtgaaacaaaaatgaacaaatagctaagataaggttttaaaatgaaagcaaatgcggtaacaccttttccactgcgaaatttctgatgatcattgacttatctcttctgcacttgttcttcacttattcttcacttcttcttcatcttatcactgttacaacaatggaactcactcaacagaacaagtcaatcctcaatgctgctttagtattggcttttggaattatattatcaattattatcctaaaatttggatcctatacaccttttttacaacctgcaaatgctacagttcttatgcaacttttatttctatggttaattattacatttgttttggttagaattatgacttccatcccagaatatattaaatatatcccacttactattagtatgctgataagtatttctgccgttattattcttggctttgaaaatgatgtacacaatgattaaaaaattgataattaattaacatttccaattgttaaacttgacaaatttagattttgtgtcaatattattaactataaactcagctttctcttttacttctttatcacggtcctttatagtgttttttcttatcatataacactacatttggtatattattaaactatctgaattttaatatttaaaagtcaaatcataccctaactaaagattcttttttcatctatttcttttttctttattggattaattctatcaatggaatagcttcatttaaattttaatcaaggttttctcctaatgtattgaaagattttaagtttgatgtttcaatttattaatattgagagaaagttaaatcaatttaaattaaggactttatttgtttaatcttttgtctttatcactgttaataaactcttttttcactcttaaaagattgttttatattcccttttatataaaacttggacaatcatgtcatatggtacttattttgcttatctaactataacctaaatatttatttttgattatgtctttaattctaaccatactcaatcaaatttaaaccttttaaaccctaaaatgatttgttaaacaatttatgataatatctaaccaaaaaatatttaatatttaaaaaacaactctctctttcctatattcaccaaaatcactgttttgaaagaaaatttttaactttttttcagcaagatttttgttgatatttttaaataatcataataaatagatgattctctatacatatttattgagaaaacatctaaattcactgatttttacctaattttgtgtggatcacgtgaaaatgtattgcgcagaatgttctgaggggttgaaaaccaactgaatggggctatggctcaatggtagagctttcgactccaaatcgaaaggttgcaggttcgattcctgttggcctcaattcaacatatttttttacattttatacctaaattagacaagtttaatagagaataatcaactaacttcaattaacaattactttgtttttgatgaataaatattaaaattgttttttttacacatttttcaaactagtgtctgttttagataaatcaatatcatctattttatcaataatttgaatttgatcaaaatctattgccaattccttagatttattcaaatatttttctgaaagtttagtatcatttaattgtaaatatgcaacacctaaggaatagtaagtaataggtaaaattggatttttaatatcaacactggaaattaattttaagtaaatatcaatagccttttcataatataatttattatttgatttttgacctaattgaaaccatgaagaaccaatatttaaaatttgtgtttcacctgaaactgtattattaaatcccgatattgcagtccatagaaagttactttgtaatattgttaaactatctgatattctacctaaattcatcaatgtcattgcataaaaatctcttaattttaaatatgattcaatccaagctggccatactttatcttggaaagttctagttaattcccaacaatttataaaatctttagcctcctctgattcaatattatcttcaatccattttgttctatccttatttatatcaagtagtccattatttcttttagaccaaatatctattaattctaatatattaacttttttattattcgttgcagcccatggtaatcttttcggtatttcataattttcaatataatcaactctatcacgtaattcttcaataacttttgatgaactatttggatccttataagataatttcagcattgcccatcttgtaattacaattagatctctatcaattaataaatctctctctggattttcataatctatcttattacgaattaaattctcaaatatgaatgtacttaaattatagtaagttaacagtaattgctctttcatatctaacttttcatacatttcaccaattttcaatacaattccagtatattttaaactcaattgatccattccttcatccttagctgtatttaaacctttttgataattcttcaaagcttttaaatattgatcatttccatctctttcttcccataaacctttccttaaatctttactgacattagtagaatatggattccatggttgccatagatacatagttactgaacctgcaactagaataaatgtaccatatcgtacatatttacctatcctttcatttcttttcttatccctattgaatttctcatgttccttaatagctctctcacttggtgggatatacttgttgactttcttgatattctgtaaaaggatgttggttcttttcaacattatatatgagtaattgatagatgtaataagagttgcagaaatcctagaaagaagaaacgtaaagtcatatatcaatctctaatttaacatgaaaaattcatgaaaagtgaaaatatcatcaaattctccatttgattcatgttgatctttggagttttcttaggatatcaatgttcatttggatctgatttacatgtgtctatatgatgttgatctatttgttgtcatacactagttttatatatgacgttaatagggtaagatatacgatgatttcaatattgaattaaatagtacttattaattatacaaaaatatttctattaatcttgtatagaataaaagaatctgttctgattgacattaatagaatatattagaataaatttaaattaaaccgaaaagatgtcgaacaatttaaacgaagattcaaatgatcatattgaagataatgatatcgtcatggatgataaaacaaggcatatgcatgaagttatgatagatgttacttaccagttgatccggcatgttcggattcctagcacctaaatctatacttcataaattccgtcccagagatcctaacatggggggtcaacggggaagtagccataactttcaactttagtatctttgcacagcaagcgttcatggctatcagaagatcattatctcaaacaaacatcaaatggtgtggtttcttagaaaatgcaatttgttcaatcatcaaaagatcattatctccaaaggtacgtgaacatgtcgagaaggtatgcgttggtcaaatggatacttcggtaatgtatttgtgtgaagccataaaatttttagatattatagttgatccacgtagactatatgctactatcatggaaatcaaattagaaaaccatgattactcaaaattttaccaagaattgaaacgagttgatatgaccgcaaggttattaaagatcaacccaaatgcacaaaagtttcatattgatataattgaaaataatatgtcaaatctgttggaaaccaattaaataattcaatattgtaattttactgttgattatcaatagtgcaaactaacagctttgccacctatatcacaccaacagggactccccatcgaagtgaagcacaccaaaagagaagctcaaaagatccaaaagaagaggagaaagtggccaaaagatggaaaactttgaaaactgaaaattttcatcctttttaaattgaaattgaaactttgttttattacgtaatttttgagatgaggagagagatgttaattaactgctacttatacatcttatcttatcttaattttattctacaccgacaatatggacactattagagataaatacgacgtggttactgcatcatttgtatcacaaccaagatctagggaagaatctaaagctttattaagaaaatttagagataacctgaaatcatcatttgatgaattatcaaatgctgttagggaagattttaataaacctgaattagaattttatgttgcagaatatgcacctgcaattggtgaattaactaatatttcaaataatttagatacaattttatcatcatctaaaaagtctaattcaataccaataacattttcaactttatcaacagaaattgagaaatctccattaggtacaattttaatcatttctccatttaattatccacttattttagcagtttctccattaattggtgcaattgcatctggtaataatgttgttttgaaattaccttatgatcaattaccaaatttctcaaatgctttaaaattagttattgataattcattccctcaagatcaagttttagtagttaatggtggtattgaagaatctcaattcctcttaaatgattgtaaatttgataaaatctttttcactggttcaactaatgttggtaagattgtttataaggcagcagctgaaaaattaacacctgttgttcttgaattaggtggtaaatcccctgttttcatctcaaagaatattgatatatcatcattggaaaaattattgaaacgtttattatggggtaaattcacaaatgcaggtcaaacttgtgttgctcctgattatttattaattgattcatcagtctatgataaagttttaaatattatctttaaaattttcaaatcagattttgcaaatgttaataaatcagatgaattctctcatattgttaatgaaagaggttttattagattatctcaaatcttacaagaaactaaaggtgatattctatcaggtgataataaatcagataaagattcattattcttctctccaactattgtatctaatattgattggaatgatagtttaatgcaatctgaaattttcggtccaattttaccaattatgaaatataattcatcattaactgatattgttaaaaaagttgcttcaattcatgatactccattggctgcttacttattctcatcaagtgataatgatttgaagatcttacaaaaatatttaagatctggtggtattgtagttaatgatgctttatggactgcaggttgttttataactccattcggtggtataggtactagtgggtttggtaattatcattctaaatggacaattgatactttcactcatgaaagagccgttttaaagcaacctttatgggcagaatctttaattagttcaagatatttcccttatacaaaggaaaacttaaaagctttaaaattagtttcatcattacctgaaataccaattgcaactttaaagaatttggcataccttctatccatctttgctattggtttcttacttggtaaatacttctcataaacttgaagggctacatttatttgttattgtctttttattatgtattaagagtcctttataaaaaattatttagttattgttacttttccttttatacattaaatgcatatgattattattataatatcacatcaatcgaaataatacccacctgcaataaaacgaatcatgtattcatcaatatgtccaattgaatcatcatcgtcttcatattcttcttcttcttcatttccattctcatcaccgtttccatttccatttccattttgttcaacatcttcatttgaatctaaatgtttatgtttttctctttctgcaatacgaactgcaagtgcttcagcttcagctgcctcttctccttctttattatttgaatttgaaattgcatttccattattattaccatttccttccttcttattaccatttgccttttcatcatctgagaaatcttcaacatcagcttcaagttcatttaatgcaacttcagcagctttggcatcatcttcatcttctgccatctctaatgctttggtaaattcagaactagtcatttctttctcttcattcataacttcagttgatgatttacctaataattcttgaactgaaactttattaaaataatctgttgtaaaatcaccttcttgaataacaacatcatctaaatatttcttttgttctgccttctttaaaatatttgcttcaattgtatattcagaaacaaatctataaatatgaacatctctagtttgaccaattctatgacatctatcttgacattgtttatcaattgcaggattccaatctgaatcatagaaaataacagtatctgcacctgttaaattaatacctaaaccacctgctcttgtacttaaaataaaacatttaacacgtatatcattattaaaactttcagttaataattgacgatcttcaattttagttgcaccatctaatctcatataagtataaccacgataatttaaaaataattccaatatatctaaaactttcgacatttgtgtgaaaattaaaactcgatgaccttgagggattaattcagataataatgttgcaagtttttgtaatttaccacaatcatattgtaataatgatttatcagggaatgcgatagatgagctaacttgaatttgatgaaatggattttcaattatatcattttgtgaatcatacattaaattttctttcagttcatctggaaacattaagttagtaaagttagtacaaactgccttaggagtgacaaatgcatattcttttataacaaatttagaatctgatgcaatatcagagacagatttcatcagttttaattcttgaagttgattagttaatacttttggtttcctcattgataacatgttaattaaacttggagatataacacacgatttatcacaattattatcatttatatattttttatgtgacatttcatttaacaagttaatattttcttcatttagcaaatattcataataaagttctaaatcattgaagttgggtataagtgatttatcctttatttccttttctaattcctgaattttttgtaaaaatatttttgatgcacttaatctattaattgtttcataatggtaagaattcatgttttctgaacaattggaaatattattcatatttaaaaatgataaatcaactttttcaatttcgtttgttttcattaattgattaacctttaggaaattagattcaaaatttgatataattgatttctcttgtgaaaaacttgttaaaattggtctaacttcaaataaatcaggatgattacaaactttccttaattgcattaaacagttgataatactcaaaaaattgccacttgcgagtgtttcctttgtttgtgctctactcataaaatcatcatataataatctttgacgttttgataacctacaataaacaatatgttcatattttgcaggcatttgcttttcaacatctttctttaaacgacgtaataaataaggtcttaaaacttgatgtaatttatgaacagtttcctttgtttcattatctttaccaccttgttgaataattttatcaaccggtttaccaaaccattgttggaaatccattaaatctgcaaaaccttcaggcattgtaacatcaccctctcttgaagttggcattaaaaaataaagtaatgaccataattccataatattattttgaagtggagtaccagttaataaaattctattttcagtattaaagtttaataaagctttccatctttgagatttaaaatttttaatattatgagcttcatctaaaatcatatacttccatttttttcttctaaaaattggttgatcatgaacaactaattgatatgaagttatacaaatatgaaatgaatcaggggtattccaacctttacgtttttctttacgttgttgaggtgaaccataataagttaaaactttaaaaccaggagcaaatcttttaaattccatttcccaatttaacatgacagatgttggaacaacaattaaatgaggaccccaaatatttttttcacaagctaaatatgataataatgaaattgtttgaattgttttacccaaccccatttcatctgctaaaataccattagtaccattattataaagagatgctaaccaatttaaaccttgcttttgataaggacgtaaagtaccctttaataaaattggagttggaacatcgggtataccttgttcatcaagtaattctgttttttcaggtgatgatgaaggtgtttcatcattttgatttggttcactatatacagattcatcatcctcttcatcctcatcttcatcatttccttcatcatttcctgtattgaaaagtgaatgtaaaccaggtttattttcttcatcaattgaatattcactttcattagatgataatgatgattcatcactatcagataaatcagaatcatcagatgaggaattactatcttcatctaataatggattagaattttcttctagtaatttgattctaacagattcatctaaattatcaacaatcgtaggtattttttcagaagtatcatctttatataacaatgaaagactcgaattattattattatcattggaatcagtaccattgatattaaagttttttaatttttcatatttctcctttaatttttcatctgataatttactatcatcatcaacaggtatattttcattttgatcaatactcatatgatcatcctcatctgaactacttgaagaaaaattatcactttcactgtgactttcactatcatcatcttcactattattttcactttgaattttttcaggttcaacacttgaattattatttgaagattttgtaatcatttgagcacctaaaactttagtactatgatctaaaattttagataattgttcctttgattttttcaatcttaaatgttcattttctctttcttctaaaactttataagctttaacagcaatattccatttctttttaacttctttagctgtatctcttgccaatctataaattttcttttgaaattctttttcctttttatcattttcttgagataatcttttaaaatgaacttcaatcatttgagcaattcttttacatttttgaattttatttgatcttaaatcacgaattaattttgaagattttaaaccttgagcaattaaatgatcataatgagataattcatttttcattctaaatggattttcacttaatttataattatttatattataatctaaatttcttttaatcattgttggttctcttacaccattaggaacatttctaaagggattttcattataatcaatataaagtaattctttttcatttatagcatgatcaatagattttataagttcatgttgattttctaaatattcattaaatttatcagattcaatctcaggtgcaggatcttctattatatttctataagaatcaaataattgatttatattttcaaatttatgtacaggtttatgatcaggatgagatattattggaggtttaattgatattttaaatttaatctttggtagatgtattattttttgtttcttagttgtaggagtgtctctggtgttatttcgttcatgatttgaattatcatcatatttccttttattagaatcgatattagtattatcatcaaaatctagcttttctgatatcctttgattaacaaatttatttaatttatttttcaatttaattaaattatcattatcattatttaataaacgacgtgtttgcctcttatttgattttggccaaatacttaaattattatcattttcataaattttaaaactttcactatccttatttaataatatattttcaggtgttggatcataacttaaaattgaatggaaattttgaagatgataaagttgatttgttaaaatatcagtttctgcaattaaatcaattaatttttcatcatttgaagataatgaatcattagacattattaaataatatgtcctctactagcaaatacccttcaatatgttctttttcaagtgaaagtgaagtaaaacgtaagagaaaccatagtaaacctattgaaataaaatgaaagagatctacagagccgccataacagggcaacggggcaattcttttataaaaaaaatacttaccgaccctgcgaccgccactctgtgcaccactgggaatttctctcactataataataatttcaagtttttctccaaccaacatgaatatatctctctattaagatactctcccctcaatctctctatttaaaactctttcgttttagataacgaaacaatgtttactagatcaatacttaaacaatcaaacattggaattcaatcttttaaaagatttaattcaacttcaaaaaaatatggattaccaaaatttttacctgatccagaaattgaatttggtattaaaactccaaaaaattatattccaccacaatatagaaatcctcatttaaaatatgatgatcaacaaaatagagttaattttggtgaagaaattcatccttatcatgattatatggatatgtggtctcctgatcattttcaaaatgttaaagatcatgtagctgttagacaattaacaatttttttctcattattaggtttatttgcttatagtatttacgttttagatatttggcctgaaagacctaatatgccaagatcttatccttatgaaggtttatataaagatttaggtggtagagatggtgaacaatctttaatgcaagctagagttgataatggtaattaatttagtataatttaatacctctataccatcatattatcatatcattatatcatcatatcattatatcatattctctttattatttataaatactacactatacgactatttattattctatattaaattaaaaaaaaaaaatattataaaattcatatgactatatgatcatttggccctatgactatatgattatatgactatatgacccaatgactatatgattatatgacttcactctctgtatcatatttcattgtactatcataaagtaattattgattaaaggttgatatctttcaaatgattacgtaagtatatatcatgattatgaattagatacaagacattttatgtacaataaattattataataattcaaataaaactaaactaaattaaactatataagaaattaaaaaattaaagttaattagagtaacaaaattaacaccagaatttataaattctataatagaaaggttttgaagcaatgaaagctttttcttctgcaatttcttgttttaataattctaaatcaacttctcttctacctgtatcaatatctaaatcacctgcaggaataaataatctaaaatctttcttatagaataaccagaagaaataacaaacaattaaaattggaacacaaaggaaaacttcaaagaatgatgttgcatttgccttttcaccaattgggaataatgcaacccaaaattgtgccattaaaattaaacaatttaataaaacaccaaacattgaaccaattatacctgattgtgctttaaatggtaattcatcagtacctctacctttagcctttaatgcagctctaaatcttaaatgacatgcacaaattgaaccccaagtgaaaattgatgataaacctgataatgctaacatccaagtaaagacatcatcatgatgttttgaagctgctaagaaacaaagtaatccaataaataatgaaactgcaacaccaactaatggtctaccttctctatcaatataaccacaaattcttggtgcaaaaccttgatctgctaatgaagcaacagttcttgaagctgcataaactgatgaattagcaacagaacaaacagcaatcataataactgcattcataactgatggtaaacctttaataccagcattttgaattgaaataacaaaaggagaagcagcagcacctgaattacctaataatcttggatcagtataaggaacattaacaccaactaaagtaagtgaaataatataaaataatgcaattctccagaaaacttgctttgttgcagaaggtaaagattttcttggattttcagtttcagcagctgctaaaccaactaattcagtaccagcaaatgagaaagcagatgtaacgaaaactgcacaaacacctttaaaaccagctgcaaatgcaccaggattatgccaatattgaccaccaatataaccacctcttggaccaccaccacaattaatgacaatacctaaaataatataaccaagaattgctaaaacttttaaaaatgaaaataaaaattcagcttcaccataacctttaacaccgaaaatattaataaataaaactaaaacataaaagataacaacccaagcagcagaattaatttcatcattccaataatcaattgtaattgcagcagcaactaattctaaaggtaaaacaactaaccattgtaaagcataattccaagccatacagaaaccccaagcaggtgtaataaatctagtattaaattgaacaaatgaaccagcaactgggaaagcaacacataattcacctaaagcttgaacggtacaatacatcatcataccagttaaaatccaagcaataactaaagcagctggaccaccagttgctaaagcagaaccggcaccaacgaataaaccagtaccaattgaaccaccaattgcaatcatttgtaaatgtctattttttaaacctctctttaatggagatcttgcagcaattaaattagctctttcaacatcagttaaattaggatcaatttcacctaaatctaaaggtttaaaaccatcaacaaaatttctccaccaaccattattattattttcatattgagcataagggtcaacataaccaccatcattattagcatttgaagttgaagaagtatctttattataatcgattggagatacattagtatcaactaaatctttttcgtcataagttttctcaatagacataatgaaagaagatttttttttgtttaaaggaaacagaagaaaaaaaaaggaaagaacaaagaataatagaatgaaataagatgggaaaggtttgaatttatataataatcagaaattaaattaaattaagttaaatgaacataaattaaatgaacagttatcagataagagataaactgggcagaaacagaataaattggataagattaattaaacagtgccattcaagacatttaagattagattagattagattagagtagattagattagattacgatgggcagaaatagaaatcgtaataccgttcgatgatcaaacagataattatcatcatatcatcatcattatcatcataataatcattatcatctaataaaattttcttatcagttagtaatgcctcacttaaaattttcttatcgcttatattatcttattttcttattgtttcattctctatggcatttaacgttggttaattgattattattgattattattatttattattattatttattatttaagatcttattatattctatctaatgccatttcatttatatggcattacgttaataggagttattattattattatttaatattattttaaattatttacatgatcttatttaattatactagtctatacattacgtaatcaccatcattttaatacattatcagtatcaataatccattcatcattttctccatctctgataatcataccttgttcttgtaaattcttaaacatatcctgtggaacccatccattggttgcaatgaaaggtttactactattctcaatttcatatttcttaatctcattagtaaattcctcaatttcaacttcattaaatttaattaaattattttctccaattttttttcctaaaataccattattattataattctcccacatggtggaaatttcaattaatccattctcaatataaagataatctttaatctctttaaaatttaataaattaatatatggatttttaactaatttaataactggtgaaataactccaactaattctttgcttctcttattaataccaacttcccataaaaattgatttctagttctcttaaacataaatttatattgttccttttcaacatcatccaaattttcaaaatcttcaatttcttcatttaaactgaaaattttacctccattatattcaataaatttaggataattactaattaagaatggtttaataatacaattctcaaaatcaataaattgatatcctttatcttctttcctaataagaacattcattggatctaaatctccaatttgtaatcttggcttgattaattcttccatatttggaattaatgtctcttcagtgttaagattgaaaatttcacctgaaattttattcattttctctaaaacatgcttagccatcaataaatcttccttcttttccttaatttccttattaccattttctaataattgtaatttcttacctaaatttaaaatctctaactcatttaaatctttaatcatctttaatggttcatctcccttccatggacctgcaaatttattaatttcttcatcacttaaatattccttatttctataataagcagtttcaacacttggcccaataacccatctatcttgattttcaaatgctgttaacccatttggacaatcatctttaaaataaattgaaccaaaatttttaaatataaaatcaccaacaattttattaaaatctgccaatggttcaataacttcatttaatttttcaattgcaattggatcatctaatttattattttcactatcgattaatggattccatttcttcattaatgaacattcaacatcttcaacatattccattaaaataaattcatgacctaatggattttcacttgtactactatatgataaaacttttggaatatttaaatttaacatattatttaaaaaatccattgttgcaacttcactctcaatctttctcttagtgaaaagtttagaatgtaatgtatatggtaatcttaaaattaatttcttatcagtattatccatttcaattctataaactctatgatgtttaccttcatgtaatgaaacaatttgtttaatagtaccaacttctttaatatccttgaaaaaatttggaatattattaagtaaaactttacaattttgaatatccttaatagcatcaggattactctcttctgataatttattactaactttaacattttgacatctactaattaaatcatttaatccttgaattgaaaatttagtaaatcttttacttttctcaagagtatcattctttaaccatgtaccccaagaatattgaaacatatgttctctatttggatcagtatcatctaataaattagttgatgaaactttacccttgtcagaaattgttgattgaaatctaatattgttgataatagttctagaaccaccaacaacactaactctgttagcagtcttcaataaagaagcagtgtttctcagtaattgtctcttacctacagctgaaagcatggtctgtatctctatctaaatctatatccttcaaaagaaagactcttctccaatggcaataactttaaattgtcgacgacccagtgaaaaattcatgttaaacaaagtccgcgtaaattttcattatgtaattactttactatatatggaggctcattcttttctttctttcacttcttcttttgcttcttttgcttcttttgccacagctcactgtagataaccatgagtcaagtagtaaaatgtaaaacaagagtctcagacagattcacccagtctcagagtgaaaggacaattcttgagattttgagaatgtcaatttcatgtatttcattcttacgtggatttttcaatgatgagcattttgaagataatgtgtttcaaattaataataataataataataataataataataataataataataataataataataataataataaagtaaataatagtaataatacaaagactgataaaattaaaattaaaaatctaaagaaaggtgtatctgatgaatgtgatataattaatgattggattgatatttcaattaagaattcaattcatgataaatatttaaaggcaattaatttatcagttatcacagataaggaaaatccaactgatatatttgaatcatatattttcaatattgattatttaacaacttctgttcaatcaatttcatttaatggtaatataactttaactcctggtgaattaactaaaattcaaattttcagtttaatgaaaaaaattatccttttaacacaatctttatcaccattaccaaataaaagatatttatcaatgagattattatataatgataaatgtccattagattattatactgaaaattttattgattgttcaaatgagaaaccttcaatgattaaattacctgaaaatttaattgatgatttatatattcaatgtggtgaaattaattctgttcatcatgaattatcaacttgtcttatctcaaaatcaaatatgtcaagggaagattatgaaaattcaaatttaatatcaattgatcctttcgatttaattgaaagtaataatagtaatagtaataacaactctaatgacacccctaataatgatatgaaattaataacatataataattcacaagtttcacaagttaccaaagaattatacaatgtaatgtcaaattttgatactactattcatgatggacaaactcaaattatggattcaaattcacatgcccataatttaaataataattatttaccaattttatgttcatgttcttcaaattcttatttatcatattcttcattaattcaatgtaaaaaatgtaaaaaatattcacatagagtttgttattcaatcaattctaaagatagttcattcacttgttcaaattgttctaatatgaaaaatttaatttctaaaactgatttattaatattatttaatttaagaaaattaattgtcttcttccaaaataataaaactattgaacttagatcaatttcagatgcattgaataaattaggttatgaaacggataataaaagtattgttgaaacagttgtaaatgcattttcaattctaattcataagaagatcttagttatgaaaaatcataaatcttttaatcatacattattcaatgttgattttgatggtttaatgattgataatagaattgtctcaatgggtaaattttatattcgttttaattcaaatgcaactgatgaaattaatgaaatattaaatccaaaatttggttatgatcaacaagttaaggaaacacttacaaccatgagtcaattaaatgatgaaacaattttcgatgaatttgaagaatttaatttagctgataaaaaaaataataataataataataataaccaacgtccaaataaaaaagttaaaaaatcaattgatatattcagagtttaaactaaaactttccaaatctttgctagacattaattgttattttataattgtataaaaatagtttataaagaaaattttaatttttttcaagaatattggataaatcactcattctaataattcccttaaacaatgaacctgtttctgtattcttacatacaaataaattaaatgtttgtaattggaacattaaatcatatgctgttagtaatgtaaaatcttcattaactataagtaaatcttctttatgtataatattagagtataagttcaatgtttcattatccatatcaaaatcaccattcttgaatgatactttggaataattatcaatattctccttcaacttcattaataaatcattataactaatccatccaattaaaactggtacatctttattttgtaaaatgacaaacccgtcattgatggtttcattatcaatttgttcatcttgatagattgtttcaatcttattaatcaactcatctatgataattttatcatcatcaatatataaaacaaaaggataataatcactccccagtatttgaaataatttcatttcagaaaattgtgccattcttaatgtctcagtaagtcctggactaacataatttttatttaaattcattaaccataattcgaaaaatcccttagaatcaaaaatatcaagtatagtctttgcaacaacaactcctaacattaatggaatcatataagtaacagctccagtaatttcaaaaacaatgacaacagctgcaacacttgcattagttacacctgcaaagaatgatgctgcaccaacaattgcatatgaacctggtgaaacacaattcttattctcgttataacattgtaagaaaattccaccacctgatttttcttgaataaattgaacgaattctcctataaatctaccaattaatgcaccaatattaagagctggtaataagattccacctgggatgttcaatgtataggaataatttgattgaaaaaataaaacaactaaatagatgaacatttcaaataatttgtgagatgattgacaaactgcttgattgaaattcttatcattttccttacaatcatggaataaacttaataataaattattcaatgtaagattactaaaacttattggatataacataattattgtcaaaacaactacaattgaaacttccaagttttgattttccaaaatagtatttaatattgggaatttagtgtttatgagatcaatatttctagattttatcttttctttataacttaaaataatcatatgtaatttcttaaatccaattgctaagaatccacaaacaaatccaacaaacatgtaaggtaaagtttcaaaaaatataaaactattaccaatttctactataaatgtatcattaatttcaatttttttaaatggatgaactttgaaaaagataaatgttgcaattgaagaacaaacaaacccattccaaagtaatgaattaactcttgaacttaatcttaaaatttccacagaaaataataacccaccaattggagcaccaaatgctaaagaaatacccataacaaatccaattgaaataatttcccttctaattgcttcattttgtaaatttttgaatttaggagatatagttgcacttttatcaatgatgaaattaataacaccacaagagatatgaatcaatgggccttcaaaacttaataggaatccacctgatgcacaaatgaaaatcaatgaaataaatttcctgtaaataatttcaggttttaaaaaattattattaactctaccaaatattatcaactttaattcacttataccacttctagcgattgaataatcaaatttagatatccaagttccaattttagaataaactagggcaaatattaataagattatcaaacctactattgatgaaaaacctttcggtatattatggttatagacataccaattatcaacacatgattcctcaacttgaaaaaaattccccctacagtaaccatatttaagattacttaaccatgttaaagaccagtctaaaataatagctagtaaagatatcaatattgatgaaacgataagaattggccattgattatatttcgacagaagattagagaggtaagattttgttgaatactcatcatttggtgataatgatgatgctgacagtgagtcttccattcttttcctagagtataatttcctccagggtattatttggttatcgaaataagttctatcttgttcattatcgttaagattatccaatgaagagttgatattatcatcggcgtctatattgtgagtatttttgtatgatagtataggtaaagtacttggatgtgatataaagagatcctcctctgtcggatacaggttactcctattccttaccattgtctgcagaatgacaatcactccatagaaagaccttccaatgttaatcttataaaaacgttcatgtacgtaaaatacgcggtgtcccaaaacggcaaaagatcaacatgtttacttttcagtttgttgatcttttattgatgatattatctttattttatctttattttattttattttattttattttattttattgtacgattcagtcatctctttgctagtttactttctagctcttcttcagtaatcacaaaacatgctgagaactgtacgttcattaccttctctaagattgctatatcagcaagaagctaaaactttaattaacaatactccaaaaccggtattcatttcaacttatagtcatgtttctggggacttgttccatccaacaacatcaacatctacaacttttactagatctgttcaccaaactactaagaaggaaacagttttacttgattcatcatctaataaaactaaatttacttcaatgaatttacaaggattaaaggctgaatgtaagaaaagaggattgaaggtatcaggtcgtaaaattgatcttattcaaagattggtattagaggataatgctcaaagtatggaaaatgcaagatctttttctaatatggtatcatcatcatccaacgttggatcatcatctcatttatcggctaaggattttattaaacctccaagtattttaaatcaaaataatgatattaaactaaatttccaacctaatgctagtaattctgaaataatgagtcaaaagaaagatatagaagttaagagacaacaagatgctagattacaacaaaagaaaaatttagaacttaaaatgaaggaagaattacaacttcaaaaagagaaggaattggtaaaacaaatgaaattaaaatctcaggaaagagaaattgctattaagaagcaacaagaactgaaattgaagttacaaaaagaattggagtttaagaaacaacaaagagaattgaaattgaaaaagcaacaagaactcaagttacaacaagaaaaagaattagaacttaagaaacaacaggaactcaagttacaacaacaaaaagagttggagctaaagaaacaacaagagcaactccagttacaacaacaacaaaaggataaattacaaaatcttacaaaaaatattttcttagctaaacaaaagcaagaaactgtttccagtatactaaacaaagcacattcagaatctcaaaccaaagctaaattagaaattatggaaactgcaagattaaatttaaaggcacatgctagacaagcaaaggaagaaagtaaagaacaaaataaagaacaaagtaagcaaaaagatactaatcctgataataaattaacatcaagagatgtcaagtttctaactgtatttggattatctacagtaggatggtggtcattagcagagtagctaattctgattcttttttaattctgcatttatatctttagtcattcattcatttacttttgttttaattttagtttttaatcgttatttggtttcttgtttttaatagattttttaaatatttaataaatcaactttcattttgtataaagggtacataataagattagtaaaggtacatattatcaacacaaccgaagcctgcagccacaccaccttcattacttgaacttgtcttagatcttaataaatgaccagctacattattatttaaaatttcaccagttttttcattaaataggtaagtaccgaaaatacctaattctgaaacaataccatcattaagtagttcaccatttcttaaaataatattattatgaattttaggatgaattaattccattaaaatataagcttcccattctgatttggggattgaattaagaaaatttggtatatcatctttataaatattattaccaccaccttctctttgaggttttaaaacaaaattatctggtttttcaaatgctaatttacgagctaataaaccatcattagattcatcaagtggataaattttacaaaatgtatcagttattttattaatttctaaatcattatcaataaattttgataagatatcctgtttagttaaaagttgttgaattttctttgatccacttaattgagttaataatgaaggacatttaattgataatgatgattctaaagttattctaacattccaagtttcaggttgattaaattcagatggcccatatgctgatctataataaacaactgaaacttctaatccttgataatataatttatttgaattattttcatcaattttaaccattgataaaacatttggtaattctactctcttagttatgacattatgatttttcaataattgatattcaatagctctttgatcaaaagcatttctttcatttggttgtataatcattaaaacaattgatttattttcaccatttaaatatttatcattataatatttaacaccagtatataaaccattagcaagtttttcatcactttcactaataactatttcattttctttataataagttgagatattatcaccattattactatataacccattttgattaagatattgatgagttttaccaactttagaacttaacccaccaaatgatacactaacagtattaaattcaacttgtttaatttgattacttaattcatcatacatataatcagatctagttaatgatagagaaacatcttgtacaataccattatttaaagcctttaaataacaatcccataatttacctgtaaaatctttatcacttaatgataaagttttaattatgttagttaaccattcattttcacttactatattagcatataatttattataaattaattgaatatctaaacttttcaagaattgatcacgaggtaaaggagttggataaattgtaattggggcaagtacgggttgataatttaaatatggagcaggtggatacattattaatccattagagagaccaaattgagttacttcatagaccaatctttgcaattgctgttcattaagactagggaattctttcacgctcattttcagttgtctaattgaacctaaaagaaagatatcccacaaaatatagaaatcaactcagatccagtcttcattaataatcatgttgaagattgataagtaggggaaatattaccaaattcgtaaaaaattgaaatcagtgcaccaaaagtttttcaaattgaaatttttgaaaaaaattggaaattgccctgtttattttccaaagagggcaattgaagcaaaattgacacaaattgacatcttggaggctcttcctttggtgtttgcacctgtttcttctttcctctggggtggtatagagtcattggaatagctaggatatgtctctaaggttttctaaagtcctagggtcaacggatgatccaaatatggacagtttttctacattgaaacataaaaatgatttaaattcaaataataataacaacaatgatcaaacaaataatatcaaaattgaacattcagaacttcaatcaagaagagcaagaaagattgctaaaaatactggtgtaagattcccaaatttcataacttctttctcaatgtttaacaataatcattcatctcaaatgaattcattaagtaaagatcaaaatgattcaactgatttatcacatttaccattatcaacatcttctcctataagtttagcatctcattgtattaatactcaaatcaataaggatgattccgtaccttcattatatgaaactttatcaatgtttcttattgataattataatcttaatttatcatctaaaactattgatcctttcaaaagatttgaaaaagtaaattttttcaatattcctcaaaaattattagattcaaataatgaatcaattgtcactggaatgggtatgtttccagaaattgaaagagcttggttaagtactgatgataaattatatatttggaattataatgcttcattcatagatcaagaattcgatattgttagtgattttaatggtacaatcttaaaatgtcaattggttaaaccaaaacaaaaagtttttgtggaatccgttaattatcttatagttgttgcaacttcaaaggaaattaaattattaacacttgaatattctaatgataataaaaaattaattatttcagatcctcaattatctgttacatctcatggtatgattattaataatattgtttatcatgaaaaatcaagagatatttattttacaggtattggttgtggtacatcagtttggaaacttaaatattcagaatcaagtgattggtattcaaaatcaatttcaaaagaatgtctaactgaatttagtttaactgcaaacttaccttcattacctatcttaaattggctgaaaaatgatacaactaataataatgttgaatatatcgttgatttgaaaattgatcaatcaagacatatcttatatacactttcatcaaaatcagttattcaagcttatagaattaataacaataaaattggtaatccaataactaaacatatctcaagtttattaaaagaattatcaactacttctccaattaatattagatcaccattacttaaaaaatcaaatttgaaattaattagtatacatcctgtaagtaaaaatgaaaataaaaatttgttcttagttgttgttgcttcaaatggctgtagattttatattaatggtagtacaatttatgatgatcatctaacacttacaactaatttcttaaagttccctccaatgaataaagcatttcatgaaaaaatttctaaaagaaaagaaaatatgttaactcaaaatcaaaatattaatcaaaataataataaccaaaatcagtcatatcttgggaatcaaaatttaataaatcaagattcaatgttaatgaatccaacaaaatctaaatataattcatacttcaactcatcaataaataaatcagttaaatctgataaatcaatcacaaaatcagtcactccattattaatctcacctgaagaactaagaaatgctcaagaaacctcagaaatcttacaaaatacttctaaatctttgataatatcacctggtatatttgttggtttttctgaagaacttggattatatacaagtactcctgattatggtatattcaaaaaggattcacaatatatagaagattttgaaattgaagataaattatcaaatatctttgaaattgttcaattaactgaatcatttaatcctgttaatcaaccattaggttatgcaaatgaatttgcttcacaatatactaaaaaacctttggaatttgcagttttatcaaatataggtatttcagtctatcgttatagaacaccagatttaattcttgaagattcactggatgatcaaacatttaaaaaattcgccttaaaatacggttctgatgaagcttgctcaactgcattatttttagcttgtaaatatgataaatcagaaacttttagaaatactgcaactcaatattttatatctggtggtaaaaattcaaaattagatcattcattatcaccaattattgataacgttgaaccaagtgatagatttttcgctgttttattattattttcacgtttaattagaaatgtttgggataaagaagttttcaaattaaaatcagatatcaaatatgataaaatgggttatattgatgtacgttcaattaagaaattagagaataaaaatagtattttagaaaatgttaacattactaagagtgaattagaattcttattatgttctatcttaattgttattaattattttgaagataataagaatataattccaggattatccaatatcaataatcaaaatgaaacaacttcatggaaacaaaaagttagtgaagtttgtatacaagctgaacaaatatgttttgattcaatttctaaatttttaaacatagtcaaggaaggtttatcatttttagcaattttattagaagatagtcacaatgataatactgattcaaataatgaaaattttcaaaaaatcatttcattccttccaatccaattacaagcagatttaagttgtattacatttgctgatttctttactaaatctgatcctaatgtttccaaattaattaaagaactattatcatgtattattaataaatgtatctctgaaggaaattctgttgagttagttgcaaatactttacaagagaagtgtggctatttctgttcaactgatgatgttttgattttcaaagcagttgaaagtttaaaacaagcaaaggattattctgatgcaaaggatatttcattaaaggaaaaatatttagaaaatggtattaaattattaaaacaaagtggtgattcattatcagatgaaataattgctgattgtgttaatgcaattttagaattaggatattattcaaatgctgttgaatttttattagatattgcaaatactcctgaattagtaaaactttcattacaatatcaaaatgatattcaaatgtcagttccaactgatataaataaaaagagatgtcatcaacgtaaactaaaactatatcatataatatttcaaattttaatagatgttgataagaaggcagtatcaagtattgaaaaggcatccaatgcttcacttattggatcaactaaggatgaatctcatatgtatgttgataatgaaggacatttagttacatattattctaaattaagggatgaatgttataagatttgtttaaattcaagtgataaattattacattttgaattatataaatggtttattgcaaatggtgttagtgaaaaattacttgttattgaaactccatatattttagatttcttaagacaagaatcttctcatgatttagaaatgagtaaacttttatggatttattattctaagaaaggtaattattatgaagctgcatgtcaattatatattttagcattatcacaatttaagattaaattagttgatagaattcaatttttatcagttgcaaatagttttgttcaagttattgaaacacaatttgttaaacaagatattatggaacttgcagctaaaattaatgatttaatatcagtttcaaatttacaggatgaattattaataactattttacaagattcaagagttggacaaatggctaaaaatattgccaaggatgcattagatggtgaaattttaacaataaatgaattatataatgaatatattgatccattaggttattatgaattagcattagtttgtttcaaattatcagattatagaaatcgtgaagatgttttatataaatggggatgtattttcgataaatggtttattgaatacaaagaaaaggaaaatcatgaaaatagtttgttttatattgaaataatgaataaatttatattaattgctgagaaagttaaagatactgaaggtttatttacattaacagatttaataccattaattttaaaatctgtttataaacatcttgaagataaaagtcaaaaagttccaaagggtacatttattgaaattttcaagaagagtggtataacatatagtaaattatattataatttaaagaaagttatagagagtactacatttgaattatttgaaggttatagtaatgtattaaatgaagagatgtgttatttaattaaagattggtataagaatgataagaaattaaaacaaaggattaatcctgcatcaattgataaattggaaaaatacacagttaatgacgatccaattttcaattatattaaatctacaggtaatcctttatgattagaattagaattagaattgtatatttacatttacatttataaaagtatttacatttactgtattaatggtatctatgtttttaatctattatgattacttcattgtcgaaaggttttgatggttgtagtttcttttctggttctttatctttctctttctctttatctttctctattttaatgattggaaatagttttgactcattatccttatctttatcattcccatcatcatcttcatcatctgaaactaatgatacaatatcaactatacttaaactatcatcgttaggtacatttttcaatttatcatcatcattttcagcacaagataattgatcatttcgtcgtctctctgcagcttttaacattaaatctcttataggtaaagtagtagaattaatattatttgaaccaagttttgatactttagttgtatataatttttgaattttattttgtgaaattaacttattattaaaattatttggataagaggttacattcaatgattttttaatttgtaattcaaaatatttatccttatattcatctaataatttatagaaaacattattatgaggaccttgagtattatgaactaattcatgtaacattgttccgacaatttcattagtatctaagaaccatttatcattattaggtgatcttaaacgtaaacaaattttaaaacctctattaacatttaaacctaataaatgattatcttttggatacatttcacataataaattaacatttaaattataaaaatccattattggagaaactaatgatgcaatttcatgtaataattctaatgctttatctgatgaatctttatttgttaatgatgcaattttaataattcttgacgtgggaggtttcctctcaggtggtttctttttggggaatttacccctacctttaagtaccattggtgtcgatgtagttacaaaataaaaagaaaagatgatgattagaaaattaaagaacggatcatgtaaattatttttttagggtgaaattttgataacagtgggggaatgtaagaagtacattacatactattattatattaattgattagtctaaatagataagagagtgtttataaaggagagatacgtaaagatactgactaattaaatacctctattaaaccaaacagatttaattttttcaccatttttatcttttaaattatgaaattcattttctaatgaattaggattaacaaatcttctttgagggaaaacagctaaagcaaaaggtaaagcaattagtgaagttgaaaaaattaaacctaaattagttaaagtaacagcagttaatgatttattttttaaaattgatttttgtaattgaactaaaattaaaggaggtaaaaccataattggagttgcatttataactcttgaagcggcagtttcaccaactgcttgaaatgctgcctttttagaagtacctaaagtattaccattatcatcaaatactgatataccttttttaatttcttgacttctcattaagaatacattaacaataccagcagaaacgacagctgcaaatggtactaatctaccaaggattaattttgaattatttgaaatatttttcaattttggtacaattgaatttaaacctaatgcaacaccacatgaagcaccaactgctaagaaataatttgtaactaattgtttagttgataaaggatgagatttatttgcattagcagtattaactgcaacatttaaagattgattagcaatttgccaaaaaattgtacctgcagtacctaaaccaggagttaacataccagctgtaactactaaatttgataaaacacaacaagacattctaaatggtaagaaaaccgtttcaccagtatcaggatgaactgaagaatctaaaattttctttgcattccataattttggtgtcatttcaggtataacaccatttttataatcccaaattaaacgtttactttcttgaatatctttggaagttgataataacattgttggatcagatataccaatacaatgtttaactctaccaagataagtatttaaatcataacgagaatctggtaatgagattggacctggaacagatgatgccattgtctatgaagatatagttctatactaattcaaatcattaatgaaacaccattagttgatacataaccaagtgaaaaattcaagggtcgaccctggtgaaaaatttgaaaaaaaaaattttttcagtgagtgaggaaatttattagctaattattagctaataattggtaattggtagtttattatattatggtaagagtcatagttgctattggtgaatgtattggtattggtatatatgtgtatgtagagtagtatagtatagtagaatagagtagagtatatcagataatatactacaataagccactactcccagactcttacgtaaagcacactcctatactgctagaccttcccaaataggaataactatcctcccttatctgttatctacactctcttataggttaacccgctaagattgtttatcagttcattactgttttaactgttttactttcatttcttcggagcatgccatttgtggatatacagggtcttctcttagtttaactccgatgtatttatttcatgatatattataatataagctcaaattttttttgttatcgtgattatttgttatctgtctatttatcttatctgttatcaaaataaaaaaaatttatttaatattattattcctatctaatcttatcactgtatcattatcttctattgtcttttcatttctatttatatattcctctgtaatgccgattatttaaaatgaacccttacctgtttatttccttctaataacatacactcttaaacaatgtcaaaaccttcattaacaacagggttctcacccataacttcagctcaatcaagaattcatgatattacaactggtgcttcaaatattagagaaattgatgcaaaattagccgtaaatgatgatgatttattagctgaaattggttataaacaagaattaaagagaagattttcaactttccaaatcttcggtattgcttattcaattatgggtattttaccttcagttgcttctcttttaggtactgctctcgcatctggtccttcaggtgctgtttggtcttgggcaattgcttcttgctttattttaacaattggtactgcaatgtctgaattagcaagtgcaattccaacttcaggtggtttatattattggactttttattatgctccagattctttaaaagttccattatcttttatgattggtatatcaaatacaatggctttatgttctggtactgtatctatcttttatggtaatgcacaagaaattttagctgcagtttatttaactaaagatggtaatttcgatataactaatggtaaaacttatggtgttttcgcaggttgtgttattgcaggtactttaatttcatgtttatcatcaaaaaatgttgcattattacaaactatttcatctatttgtcatactggtctattggttttattctttattgctttaccaattggtacaagagttaatagacatcattttaataatggtagtttcattttcggtactgttgaaaatatgtcagattggccaaaaggttggcaattttgtttatcatttatgacagctgtttggacaattggtgcatttgattcatgtgttcatatgtctgaagaagctaaaaatgcttcttatggtgttccaattggtatttgtggttcaattacaacttgtggatttttaggatttttcatcttgatttgtaccactgcttgtatgaatcctgatgttgcaactgttttatcaactgatactggtttcccaatggcccaaattttttatgattcattaggtagaagatgggcaattgcatttatgtcattaatggcagtttgtcaatggcttatgggttgttcattaattactgctgcttcaagacaaatttgggcttttgcaagagatgatggtttaccattttcaagtattgttaaagttgttaataaaaaaatgaaagttccattaagagcaattgttttagcttgtttaatttctttagcaattggttgtctttgtttagcaggtcctgcagcttcaggtgctttattctctttaggtgtcttaggtaattatgttgcttggtgtatgccaattttactcaaattaacttctggtaaggataaatttgtacctggttcattctatttaggtaaattttggtctaattttattggttggactgcatgtacttggggggctttcattatggttttagtttgtttccctgcaactaaaattgttgataaaactgatatgaattattgtattgttattaatggtggtgtttggattttagcattggtattcttctttacttataaatataaatattatcatggtccaagaagtaatttacatgatgaaactgttgaaacagattcaagtgcagaagatgttgatatgccacatgctgaaaaggtttaaattgataattgataattgataattaataaataatgtatacattcaataaattgcttttataatataattttaataacttttaataacttttaataacttttgataacttttgatcttacaatttggaatggactgaaatgacaattaataaacttttcatggtccgcgtataaatagagcatgatttccttttattcatgatttacttcaagatacactctttcttcaagaggtgactagagatagactccagtgtatattgggtgttggaaacaacattaaatacctgagaggtgtgtgtcaatcacactgttcctcgtgagttctattttagtaatctaatttgaaatcgttattaaaagttgatgagagacttacataactgaaaaattacaagtttaagacaagctgaatttactgatttgtttattgattatacaaatacacattataataaaatgaggaacgtttataatggtgttttcaaagttactgatttcacaactcaaactgaaattcaaattgatgattatcaattgaaggtatctcttttagtaaagaaagaatgctgtaattgtacaataaatttttgaatacttataatgatggtttgaaaaagttaacacaactgggtattgatctagatactgttgaatctgtctctcgtcttggtatttctaagtataaggttttaactgatgcattttacaattgttttgataaaaatactacttatattaaaagatacaagaaagttagtactggtaatcctgttgttatgaatagaatttttaaaatcatttcagacatgtcttctgcaatgttgttaatgctccatttctctgccagtggtagttacagattgtttgagatgtcttattttaacatggataatttgggcactattatgaaaatatattaacccggtgatggtaaatcatatttacatattgtttctgcatattccaagaataaaaagttagaacctagagtgttgcttgtgaatgataaggtaactaggtacttcattcattttattttagctttgttcccattgaaaaaagatacaatgaaaaatctccgtttggatccctcaattaatgatcctgttcatgttttaaactttctatcaatgcaaatagtgaaattagttaatactgctattggtgatcaacaagaaggtttaaatgcaacaaaaaacgaattaagataattggttgatagattatccattaaattggtttaatgagttttattgcaaataatgaattctgaaatttccaataccgtaccgactgattgtgtccaattggaattgttgtgcactgtaagtaccaagtgtaattgcatttgaagaggtatctgtaagatgtttctgtcggttgcaaatccattgattgtcagtgctgtttcgatttcctttttcagcggacctcttattgacttcaatgcatcagataagctatagacttcaaaaattgttgagcagaagtacttaagtttcgacatggtattttcgataagttgctgatcagtgtatgagtagcagtgtaaataagtgtttctagctcacctattaggggacataatatgtcggagttgttaaatggtaattcaaatataaatggactatatctattggaaagttttacaaatgatgaagttgaaagtaaatttagaagtttattaccatctgaatttgattattttcatacaagctatagaatctttaggcatagagttttggatgaagatattcctaatatgagaaaccatttaattggtcttcctgaattgtatgattggtttcccatattgagaaatttggaaagtaaaaattataaattaaatgattacttgatgattgaacatgtgtttaaagatccaatgtttatttgttgttttccagaacttgtacatttatcagctgttgttccagataatcaaaatattgttcatttatgtgctgattttgttatttcaatttttgaaaaaagagatcttgcaggtatgaagggtagattgatggaattaaatccagtggtgttgaaaaaagcttgtcattatttgaaggaatttaagatgctctcaatttgtttgattaaatattataagcaaaagatcattaatccaaaaagtgatgaaaagtggagaaagttctacaaacgtcatgataaaaagttaaaatcttatggatgggaaaatgaatccagaagaaatatctatttatcaagaagtttgttggagatccaatttttaaaacagcattattcattccaaatggaacttgcgttcactgttttggttcatgtcgtccatgtccatacacaaagatcgctaaggctgcaaaattgactgtttttaaattgtatagaatagcgtcaagatttgactaacaaccttttgtaaccagtgtccccttaatatatataacaaacagtaaaagctgatcaaagaaagaaagaaagaaagaaagtaaagaaatggaaattaggaaatgataattctggaaacttccactattaacatacgcgagagagctataaatagagaagggtttcctgtattacctatgattggtgtatttatattttcttctttctacagctagagattcattcaattatacttagaagtcttgtttagattggcttatcaatcaagtgcacttatttatttgctttcagttggtagcaccggttggaatcctttattctttcaattttgaaaatactttggtcaatccttggaattgggaatttatctttgattgtgttgttattcagaattctgtaatagatacatagtctcatggttccatctttctttttcacaaacaagacagggctattaaaaggactggcggatggcctgacgaatccttgagctagtagttcttcgacttgtttatttaattcaattttttcttgatggcttagtttttaaaaaaaattccatactgttgagagagtagcaatttatttcttcaatattagaaattccaaaaatccttgctgtttttcttttgatggttatgttatcttcttcatccttaatcaacttaccaacattagacgtatatgacatataattatcagaaaaatccgttttattaatggtattaaaatgacctaatgtattcaaaggaattctaatgcacaacttagcaagtgtgtgtcttcctggaataacgcaactcttgactttcttacatgttctttccattttgaaacaccaattctcaacaaaatttccaatatcttcccacttttctttattattaggtggacatttgagttgacactactttcaataagtgaggttgtgaaataaaatacataactgaatcaataatagtaaaatgtttagaaaatttcttaatgtttggtggaagtaaatgaacaattttgtaattgcttttttttatggaataaattcatcaaatctgattataaatggaaatatagaaaataattttgtgtattagtttacccagtatgtataataggacttctttataatttttaatctcttagttcaacttgttttagatttacctaactggtgaatgttttggattttaggcaactacttaaagtaacaataaaaatatcttgatatgtcaaaaaatggaattttagtgttttaattgtaaaacaattttatgcaaaatttaagtgttttaaataactcagataacaaataaaattaacctctatattaaataacatttccttgttctatactcacgtaaagtaacttcttttaagcacttttaaaaccaaaaagctgagccgccaatttctactttgtaaacgtgaatacaaaaccatgttgtaaaacaagattcgcccgtgtagcgtaatggttaacgcgtttgacttctaatcaaaagattctgggttcgactcccagcatgggtgcaggcgaaatcttcaattaattttttaatttttagttgttttactatagtaatagatagtatcttactagatattaaaggccataaaacctattaggcagactaatatgctagcatagtatgttagtctatttaacatactatacccccaccctctgcaacacgtaaagtgataataatcttttcactgattagagaagaacaaaaaaaaaaataacgtttgtttacttttcaaaatttagtaaaaattacatgcaccatgattttattttaagttttatgattgttttaaataattatttgtttattgaatttgatttataccccttgggcactgaataatgctaatatagaagagatacaaatatacattatatagtttattaaaatgtcgcaagataggaaaaaatcaagttcgttacaagatcgatattttaaaaaacttgcaaagcagaaagatcaaaacaatttgagtaatatcaatgaaattgatgaaacaaataatgatgatattaatttagatagaccatttggaaggtttgatatacctacacgttcatattctcctgaaagatttaatacaagatcaaattcaacatctcctataagatcaccaaatagatttgataattatgatgattatagaaatttacgacataatactgacattgatactaatttccatatacccagaagtccatcaccaacggagagacttatcacacacaattttaacaatgagatagaaaatccattcataacttctaaaattccatttttaaattcttatgatacgaatgataatgacgatacaatacaattacatgatttagaggcacaaaaatataatgataatttaactaaaaatccattcaatgatcaaattgttgaatttaaatataatgaagttaataatagcaatattaataataataataaaaatcaattagattcagtatttcgaaattatagctttgatgatgatgaacaattagatgatgatgaagaatttactcctttccctgtaatcgaaaactcatattatccaataaatactccacgtgatgtctataatccatttgatgttgaatattcatcatctgaaggatctgacgatgattcctttgaaactgaaagtaatttcgataaacaacaacaacaaggtagtttacgtagaaaagatacaaagtttaaaaatgcaaaggctattaaagaaactgttgattattatgatatggatcaagaaatgtcagatgaatatgaaaaaaatccatctgctaaacaagttcgtatggttgatggtaatttagttcttgattgtccagtttcagaaattttgttaagtaaatataaaataccattaactgacaaggatagagagtttctatttatgagatttcaagcatgtacagcagaacctgaattatttcaagcaaataagttctcattgagacagaaattctataccaaaccaagagaaactgaattaatgattgttattacaatgtataatgaaaatgaatttctattagcaaagacattaaaaggtgttttcaaaaatataaggcatttatataatatgaaaaattcatctacatggggtaaaaatacttggcaaaaagttgttgtttgtattgttagtgatggtagacaaaaaattaatccaagatcaaaggcattacttgcagcattgggagtttatcaggaaggatttgctaagaataaaatcaatgatgatgatgttgtctctcatatttatgagtacacgacattagttggaatatctaaaatttatgatgatcatatcacattaacaacagataatcaaattccaattcaaatgatattttgtttaaaggaacaaaacaaaaagaaaatcaattcacataaatgggcacttaaagcatttgcacctatattaaatccaaatgttataatcttaattgatgtgggcactgaaccagagaataaatcattatataaattatggaaaagttttaaagataactcaagagttgctggcagctgtggggaaattaaagctagtttaggtaaaggatggagtttattattgaacccactggttgcagctcaaaattttgaatataaaacatctaatattcttgataagccaatggaaagtgtttttggatttgtcacagttctaccaggtgctttctcagcctatagatatgaagcattattaggtgatccattagagaaatatttaaagggagaagatttaaagaaaaataatgatgatgggatatttaatgcaaatatgtatttagcagaggatagaattttatgctttgaattaattgctaaaagaaatgaaaattggattttaaaatatatcaatacagctggtgcttatactgatgttcccgagagtttagatgattttatttctcaaagaagaagatggcttaatggatcattttttgcagctgtttattcagtttgtaatttccataaaatttggttaacaaatcattcaattggtaggaaattatttctgcaaatacaatttttctatcaattattaaatttattagtttcatggttttcacttggatcatattttttagttttcagaattttaagttgttatttagctgaatctagtattaatttcccaccaggtaatgttttatcagtttttttcctttggttatatatggcatcaattactacaacatttgttttatcatttggtaataaacccaagggaactaaaattttttatttagttattgttattttttttgctgtattaatgtgttatatgatttttgcagcagttttcctatcaattaaatcaattgaagaaattattaaacaaaataagacaagttttagttggatattattagttaaagaaacacaatttagaaatttattaattgcaatttcatcaacatatgccttatacttgattggatttatattatttttacaacctattcatatgtttacaagttttgttcaatatttattattatcaccagcatatgttaatgttttaaatatttatgcattttgtaatattcatgatatttcatggggtacaaagggtcaagataaaataaatgatttaggtattgcaaggaaaggtttatctggtaatgatgaattagaaattgttattccaacaactaaatatcaaattgatcaaggatattctaaaatggttaaagaattaatgacggttccagtaaagaatgataataatggagataatattgattcagaggagaagaataaactttattttgcatttttcagatcaatgacagtattgttttggatgtttagtaattttgttttagttgcagttgtaacagagacaggaggattatcacaatttagtagtaaaagtgattcaaattctgatggtgggattttacctgcaagaaggacatttatatttttatcagttattctatatgttgttgcatttatggcattgtttagattgattggtagtgtggtttacatttttcaaagaatattaaataagtttggatttagaacataagaacctaaggatatttaattattatatacaagcatagattaaaaaccgtaaaaagatctaccagaatctttaatatcactcttcttttcagctaaagctaaaattctttccattttttcatttgtaaaaccatcattaatataataagattttgtacttttcaaatctttatcataagatattaaattaacgaaaccgaatctacctctataatcatttttaccatttggaacaattaaactatcaactttaactaattcattataagttgtaaacccattccaatttaatttttccaatattaaagtttcattatcaattaaattttcataaatttgaggttttgttgtatcataaactctccaaactcttgaaactactggttcgaaaagataagttacaatagggaaaggtaataatgataatatagcaattaattgtgatatttcagtataaaccaatccagttctatccattaaataaccaaacatacaaccaattgcaccaaatgctaatgataatctctttgaaccaataacaaaattaattaaaggattttgataaattggtaaattacttaatctaaatttcttatcaagttttaaattatggaaacttgtaccatgagttctatacttaatttgatattcttcacctaaatttggaacataatattgtttctgatcttcacccattttgattctatcatttttcactgctgaggagtgaataaaacgggttgaaagtaagaaattagaagttattaacttatttcgtattcccaacctataacaagacatcatggctcttacttctacctctttaaaccgtgtataacccactaataacccactaataaaagcaaaacaaaagcaaccacatacagtaaaagtgatgtatcacaaaaacatgtaagcaggcaccgccaaaatggaaaaaattgaattttcgcagtggcagtggacatgaacaaatttttttattttactttactttatttcactttgtttcttttgctgttttcctgtaggattggtactattatcacagctttgccttccctgattcagtagaggaagaacagaaaggaacaattatagtgtttgcgaaaataggttatttgaaattattaataagaaacattaattaattaatttgaaaagaaaaacataatggattccgcagattcaactaaatacgtgccagattacagaaaggcaaattttaaaaacaagaatagatttcaacaagatgaagttagaagaagaagagagactcaacaagttgaattaagaaagcaaaagagagaggaaatgctttcaaagagaagaaattttacaacaagtgatggatcaaatattaatggattaccagatagtgatgatgatgaagattcaactgaggaatataataatgatcaattattttatactcaacttcaacaagaattaccaattatggttaataagattaattcaggtaatttagaggatcaacttgaggcaacaattaaatttagacaaattttatcaaaggagaataatccaccaattgatttagttattgaatcaggtattgtaccaaaatttgttgaatttatgaaatctggacctgaagttttacaattagaggcagcatgggcattaactaatattgcatcaggtacaagtgaacaaactaaaattgttgttgatttaggtgcagttccattatttgttgaattattatatgcacaatcaccagaagttaaagaacaagcaatttgggctttaggtaatgttgcaggtgattcatcaacttatagagattatgttttaagatgtaatgcaatggatccagttttatcattatttcaatcaagtaaaatttcattaattagaactgcaacttggacattatcaaatttatgtagaggtaaaaatcctcaacctgattgggcaattgttagaagtgcattaccaactttagcaaaattaattttcagtgttgatgttgaaactttaattgatgcatgttgggcaatttcttatttaagtgatggtacacaagaagcaattcaagcagtttgtgatgctagaattcctaaaagattagttgaattattaggtcatgaatcaacattagttcaaactcctgcattaagagctgttggtaatattgtaacaggtacagatttacaaactcaaattgttattaatgcaggtgttttacctgcattaggacctttattaaaatctaataaagaatcaattaagaaagaagcatgttggacaatttctaatattacagcaggtaattcagatcaaattcaatcagttattgatgcaaatttaataccacaaattattaaattattaacaacaggagattataaaactaaaaaggaggcatgttgggcaatttctaatgcatcatcaggaggattatcaagacctgatcaaattagatatttagttagtcaaggttgtattaaaccattatgtgatttattatcaattgctgatattaaaattattgaagttacattagatgcaattgaaaatattttaaaagttggagaagctgataaagaagcaagaaattcaaatattaatgaatattcagttttcattgaagaagctggaggatcagataaaatttttgaatgtcaaagtaatgcaaatgataaaatttattcaaaggcatttcatataattgatacatatttctctgatgaaattgatgatatggcagattatgataatatgcaaccaaatattgatgtaaatggtcaacaatttggatttggagttgattcacaacttcaaaatggtggatttaattttaattaattaattaagttaattaattaagttaattctatttttattaatttctttatattttttctctaattttattctttattacttatttttttcactcttctcttctctcctctcccttctcattctcttaacctcttttttgaattttaattaacttcaaatttaacttttataaaccttttcttaattaatcctttaataaattattatatatatattacgtcatcagaaattatcattttagtcacacgccacactcgccgcactgtcttggaaataatttttttcatgcggctggtgaagtaataataaattagcagtttaccactatagttaatatactatctataagtattagattgtaaatattataagataattataaatatttgtttatgattaaacgaaagaagattagatattaattaaaattaattaaatagtaaaatattaaaatattagaaacatattattattattattgttgtttttttttcgataatgttaaaagtgaaagtaaggtgatgatagtagagtagagggggatataatataatttttttatttttgaaaacttattaatattataattataataataaagcagcggcagcacaaccgactgcaccagcagaccaaccaatgactgaatttttcattgtaaaaggacttgaaattgcaattgcggcattttcttcaacaatagttgtagttgtaacttcatgatgagtattattaaatttaccaaatttatgagtaccagttgaagaagaagtagatgaaccttcgtggtgagtattattaaatctaccaaatttatgagtaccagttgatgaagatgtagttgaaccttcatgatgagtattattgaatctaccaaatttatgagtaccagttgatgaagatgtagttgaaccttcatgatgagtattgttgaatctaccaaatttatgagtaccagttgatgatgaagtacttgaaccttcatgatgggtattgttaaatctaccaaatttatgagtaccagttgaagaagaagtagatgaaccttcatgatgagtattgttgaatctaccaaatttatgagtaacttcagcacctgattgagtaatagttacagtagttgttggtaatttagcgtctgccatagcattagcatcaggttgaggaattgcagcagcatttgcagttgagagcacaataccagataataaaacggaagttaacttcattatgtaaataaattgatttggctttactataaggaaagtgaaatttaaaatgaaaaatttataaaaatctataaaattcaaagattagagataaattaaagataaattagagataaattagagattgtaataattgaaaataatcataatactatttcaacagaattgagcaaacagaaaatactgaaaaagtatattacctaatacgatacataataaacagtaccggtgaaaattttcattggctgggaagtgttgcttccgtagtaggacattgtccgcgcacttactcttttgggcaataggtaaacacccgggtgatatttccattttcatttccattttcatttacccgcctccgccgcttattgggcgcgtgttcgaatctggagagtggttgtattttacacattttttaatttgccctcgaagaaataaattagctgagccaataattgccctgtttcataatttttaatttaatttttttaattttttaattggacgaccgtccagttttatacaatttatttttgcatgactttcaatttagaggctcatttctgtttttaatttattgtttcaatattgatatcgatttattattaaacaagtactgtatactacattatatactatataccaccgcttctataaatatgctgagtaaacgaaaaagaaatactcatgaagaagaatctaaatcacctgcaaattcaatttttaatccaattataaaaaggtctagaattactcgttcaacttatggttcagcagctgaattaccaatagttttagattcggaatctgattctgattctcaatcagattcagaatcaacttcaaatttagataatgaaactgatataacaacagattctgaaattattcgtagtagaaatactagaagtactagaaataaaaacaccaatatctataaaaatacagatatctcgatagactcagataatgatgctttactaagtggtagaaaaaaatcaagaccaaatactccaaaaaaatcttcaaatattaattcaacagttactcctccatcatctgcttcatcaaatatttcaacttctttaaattcaacgaaaaaatctttaaagaaagatatactgaaccctttacatttagataaggcaattttaaatcttgccgtaaaaaattctttaaaagatattaaactgaataatgaaaaaaatttagttactgagaataaagaagaggaaaaaattattaatgataaaacattagaaaaaattaaggaattggaaaaacttgagaagcttaaaaacgaaaagttggggaaagttgagaaagttaaagaggtagagaaggttgaaaagactgaaaagactgaaaaggctgagaaagttgaacaagttgaagaggtagtagagaaggctgagaatgttgaacaggtagagaaagtggagaaagttgagaaagttgttgatacttcaaaggttgataaagtcaagaaagttgataaagtagagaaagtggagaaagttgagaaagttgttgatacttcaaaggttgataaagtcgagaaagttgataaaggcgaggaagttgctaaaactataccaaataaggaaagtgaagttgccaaaagtccaaaaaaacaacagcatccaaattcccttgcaaatttaacaaataataaagccaaatctagtttagcgaatgatactaccatcaaagatactaaagatatcaaagacattaaagaatctaataaagcggacgaacataatttggaaactaattcccccaccactcccatcaatcctatcacacaaaatgataaattagcgactaataataactcaattgcagaaattcaaactgttaaattgaaaatttcaaggaataaattaaagaatccagataaacatgaaacacagaaatcaatagaaaaattaatttcttcgcgtttacaaaaatctgcgaaaaattatcatgattcaaaccccgaactaaatacatcaattccaatatcaacccttaaactgaattttgataaaagagataagagacttcaaagtttgaaaacatcatcaattgataaaatccataataaaattgataaaattgataaaattgataaaatcgacaaaattgacaaaataggtaaaataggtaaaatcggcaaaatagataaaattgaaaagccagtagttttcgatccaacaactcacaaatcttataaagatatttattcaacaagttgtatatcttgtaccaaaaagggtagaggtgattattgtaatagacaacaaccttgtgatatttgtgttggtaaaagactgaggaaatgttattatccacctgatgcggaaattgtaattcatggagttctgaaaaaatccttgagaaataataatagacaagataattttattgataaaaatcttaaaaataataattcttcaacttcgaagaatgataaggaaaataatatggatagaattgttagacttaatctgagattgggtaaagatccaaagaaggagaaatctaataaaaaatttgaagaatctgaaactgaggaagaatcagattcatcatcatctgatgattcagaagataataaaaataatgctgattcagaagataatgaaactgaagaattctcatcagatgatgatggttattattatgatcacccaactcgtaatggtaaaaaatatagatataaatatagttcaagaaaatcttcatcaccaagagataattttgagaaggctcaaaaattattaaaagaattagaatttgaaaaaagagatgttgatgtttattctgaaggtagaaggcgtagagctgcaactaggggtaattattttataccaagtgatccagataatgattcagatgatgatggttatgcagctgctgaagctagaaatgaacaaattattttaagtgaagacgaagaagagagaagaatgttaagaggggaacttgatatggaatatgttaataatttaagaagagagagagataaaaaggttaaaccaattgaagctagtgatgaaagtagtggtgaagatgatatgttctttggatagaacttataaattttcacaatctacttttaatatatttttagttattaaaaacgtgcaattgaaaagtaatagattaagacgaataaaggtatgattatatcaggaatataatacaaacttatctattattaattcaattgaagtttttaaattgtataataaactgttttttgcattgctaccaattagctatccagaaggacaagaagaaacactattttaaagcactgtcaattgtgctttttaaaaatgtttcaggttctttgaagagagggtatcattaattttgataacctagtaaaacccccattgcttactttttcttaaaattggtagcaaaaagttgtagttacatgcggaagattgcttttctaagtaagatagatttaatgttccgtggtacctcaatattgagttgttacgtaacgtaattactcatggccagaatccgatgggctcaattagaagctgatcatagatatcgacttatcgatattctgctatttatttacataattctcgatgatgattggtcaaaaaatccttaaattaaaagcaatgcagaaaatgacctttttaaaaaagtcgatgacgtcatttataagaaaaaaatattttgcgcgcattcgaacctttgataaagatttttcaaatattttcgatagctaatcagtatttatttaatatctaaggtgctatattgaattcaattaaaagatcataagaagaaataaactatatacgaataaaaatgaaaaaaatataaaccaagacgatctagaaggaaacaaaataaaatagcataataatttaattgaattaattgattaattcagttaaatatttatccgaaaaatcataaccacacatttcagcccatttaggttgataatcaaattttgaccattcactctgtaatgcattaacttgtaacattaaaccagcttccatatgccaaccaatatgacaatgaaatggaaaaacaccaggattatcaatgacaattcttaaaactgcaaatccgaaaggtggaactgaaactgtatctcttaaaattggatttgttaaatctaatctttcaggatgtttttcataaaaatttggataaaatgaacctgttttagaatttgctaaaacccaaaatttataaccatgtaaatgaaatggatgagcaccatcatcaaaattattaattaagaaatcaacaatcatatcacgtttatcaaaatttaaaatatattgattttcattaaatgtttgactattctcaatatgagaagttttattaaaattttcattaaataataattcatgcattgttgaagtatttgaaagagctctccaactataatcattaaaataagcaaatgacatttggttaccaccttccataaatgaaacatctaattcaacaaattcatcaggtctatttgaaccatttttattaattggtacttgattatttaaagttcttaattgatcttgtgggaaatctaaacattttggtgaaccaccatcataactccatgtttctttactttttggaattgaatattcattattataagaaataattgccaaaacatcagttgaaaaatcaggattattagttgctaaacaaaattgattaaatctagcatgaatccaaaatgaatctaaatcatgattagttctattcatgaaaaatgaatatctttcaccaactgatacatcaacataatcagaaattaaaggttcaattaatgtaccatcaacttcaattaatgataatttatgttcatcgattgaaaatttaaagggtaaaaaaaatccaacattaacaattctaattctataatttaaatttggatcaaaaaaagttgaagttttaaatttattattttcatcaattggtgtaaaataatttgttgattgtgaataagtacctgaaattaaacctgcatcaggtgttggttctgaattttcattatcaggtattaaataagttgataaaagttgatcagcatcttgataataataatcatttgcaacataaactctatcagcatcataattagttaaatttgaatcttcaattggagaatgaataattaaaggaccataaacaccatcagcatattgagtgccccaatgagaatgataccaataagtaccaaattctttttcaccaattggaattttataagtataatttaaacccggagcaattggacaaacattaattgaagatgcaccatcatcaaatgaattatttggataaaataaaccatgtaaatgaaatgaaactggttcatcatccattttatttaaaacatgtaaataaattgtatcaccagaatttgcttcaattaaaggaccaggatattgatcattaataacagttaaatttctaattgcaccatttgcatcaattttcagtaatgaggtaatattaaaataataatgtctatcctttgttgtattataatcatttctccaatattctaaatttgaagtataattattagcagtatctaatctccaattagttgaattattattattattattatcattatcattatcagtatcgatactattaccgtcaatatcttctttattttgttttggtattatattattattaactttatgataatctggagaaagtgaggataaattgtttaatttatgatgagatttagttaataatgtagctaataagataattaacattattgaagatgcaatgattgtacctgaaataaatattttttttctataaaatggaacttttttattaaattttgtattgtttgattcatttaatgaatcatcatcattatcattaatgtgattaatattatgattagaatttgaatcaattgaatttctagaagggtcatcaaatggattaatgtgatctaaattgtgtaatctaacagattccattgggtagatttggttaataaatgagtaaataaaattaagattaattaaaatgaaatgaaactgacaagaccttatattaaaatttgagcaaaataacctggcctatcaccttcttttaaattgtaatcaatataccattataaccccttaattaatcaaatgtaatgctacattcaattaaattactattaaactgttattctttgtcttcaatataatatatatggaatcaaatgtatctccacgtgggaactaatcatattattattttaaaaagaaatcggagaaaaaaataataaaatttccgcgcttttctcttttaattgaaaaattcagatttcagcatttcatcagcgtcaggtctcctgtctctgttccacacgagtgttgcattgattaactcttcaaatttactaatatcaatatcatattcatttctaactgattttctaatatattctttaatacttttattccctgttattatattagatgttcggtttgttttcctctttaggtattcttgattaatccccccattcttatcaaatgctttccatagtaatgtattataattaatcgtattattatcatcttcgataataaactcatgtcttgaattcaatatgtattttctagatggtatatttaaatattgaattaataaaataaataattcaaattcagtttcaggttggaaaatcggtttaccaattaataattcaattgaaattaatccaattgaccaaatatcaatcttttgattatatttacatcccattaaaacttctggtgatctataaaatcttgattgtaaatatgtatattttgtcttaccattataacatgatgatccaagatcaattattttaataatacctttattattaatcattatattctcaggttttaaatcacaatgaataatattttgtgagtgtaaataggatacaccttttaaaatatctttcattattgttttgactaaattaattgaaaatcctttaaattcattaactttaattgcttcatataatgaaatacccgctaattctgttataatacaaatatgtgatcgaaaattaaaatgttcataatatttaactatattttcatgtcttaaattcttcattatcttaatctcttcaattgattgtaataaatatttaggattattaataattattttacatgccattaaaacttttctattctgatcttcaaatgaatgattaataactgaaataactgatccaaaggctccattacccaatattgattcaatttcatatttataatttatatgatctccaattataatcttatacttattcttataatcatcaaatccataattatttttagtgtttttcaaatccgcctttatcttaattgttttactaatacctgtgaaataaatattattagggaattgcataattctttcatacattgataaattactaaataatgtcggatttttagtacttaaatcttgaaacttatatggacttttcatatgatactctgccaattcattgaaatctggggtatttttctgatatttttcacatgtattgggatttctacttaataatttcattaactcatcaattgaatcaatttttgaatgttttggtttattatatgatgataatgataatctaatcgatgatgatctacttaaccttgatttattaacatcagtattcacttgacgatctcgtatattattggtatttattgaagatttattttgaactatgtaattaaattttaatgatttactcggtatatctctaacacttgatgatctaggtattttcgattgatttattgataatctcgataaattagaattattaatttcaattgttttcttagtattgctcatcattatattggggttaattttggccttgctttgattttgattttgattttgattttcatcatttataatagcattcaaattattacaagatgtagtagataaaggtattttggataatgatgaatattgcattggagtataattaggtgctaatgacattctattcctttgcttatttgatctatgtgttatattgtcatttctactgaacccatttctacttatattattaccttcatcaattgtactaattgaagaatctggccttatgggtattctagttctatcattgcacaaagactgacgtctataggaagacgacatctgttagtttctcaaatgataatccaatctgaaaagaatataatataaaatgaacaaactaaaaactttctttgtttcagatcgaaaaaacaaacaaacaaacaaacaaacaaacaatgtggaaacctaaataaaaatttcatgtcgctatattaaattattattattattaatcaccaaatttctcttaatttaaccatttgtccaatggcaatatataccaggtagtatagtaatataagaaggaaacaagactaaatgacaccacaggaataccctttaatactacaattagttctatgtgagcttgttcatgaagcaagtgcagattcaacatgggaagacattactaataaatttatgcaacgtcatgtagttataagacttcatcattcacttttgaatactttaaaagaggaaataactcctcaaacgattccaaatatcgttgcatcaatagtcaatcacacattacaaactttgagtaggagtggcaaacgagattcagtggcgatgacggcggcggctcgtcaatacgaagaaataagtggggatcccaaacttgaacaattcataacttctggcaataaagaacgtgaatcccttgtacgatgctgtacaatcttgcacaatctctgtgttaaagatgtgaaagaagagatagaaaccagaaaagctcagtttagtaagatcctaaaagaggaaaaacttgtttaaagtgagagagagacagagagtctatttttttcatatagagggatttctatagtagtagtaatatatctttaatgtatagacctttctttagcttttctttagtaaagacacatattacacggttcttattgaatatctgatattagcattatcatttgaaaccatgaatgatcctattcacgataagaaactgtcaaatactggttctaatagtaaaaatgacgaaaaatttgaaattcagaggaaattatccttatatgataatacattgaaaatggtcctcgattcaataaagaagggtgatttaaaggatggacaagatttacaatcattatttgttggtatgtcaaatgatttccaagttaataaaattattgatgatattaatataaataaaattcaaaaattgaaaattaatgatgatatagctgtctcttttgaacctttaaaatatattggagattttggaattgatgaggaattaccagataatattgttgatatccatgcaaatacaactcctgatgaatatattcaacaaatgattcaaattataaatcaaggtaaggaagaacttgaaaataaaattaattctaaatctaaaacttcatctgatagaaaatataatcagttattatttgatactattaatgataatatggaagcagctcatgatgctgctaataatcgtaataatgaacaaaatacttctaatgttccaatagttgaaaatgaagaaaagaaacaaattaatgaaccagaacatgaagaggatgatgacgatactggaatctgtgaatgtgatgaatgtaaaatttataacataaacgctaataaaagtaataatgataatgacaatgacaatgatttttctgttcaatttgataatggaagtaatactaatagcaaaaagattattaacaacaacagtaataacaacagtaataataataataataatgccaataacattacgaacaacaaattagttaatttacaaaacttatttgaagatgaaattgctgctgctattgcaaacttttttgaaaataataaacatctgttcccatattttaataatgaacaattaaaaatgttaacagaaaataaaccaagagtttcagttgatgcatttacaaaacatttaaatcaatatcaaaaagatcgttcaaaggcaataaaagatttaacatttgcagatatggcagatatggcatcatacgtttttgaaaaagaaatgaaagatcgtgatgttgatgtagattttaaatttcgattacaacatcatcaacaacaattggagaaacatcatcaattacaacaagaacatcaaaatttaaaattacaacatcaatattataaacaaaaacatcaacaattaatggatcaatgtgaaatggctaaaaatgatttaactacaaatccaaattcaaattcgaatccaaattcaagatcaaattcaaatccaaagataaattctagtgtaaatgttaatttacatgctgattcaaatggtaatattcatgccaataagaattcagatatatcctctaataatcaaaatactcaaagaaaaactaaaaagaagttgaagaagaagaaacaacatacaggacttcaatatattaatgataatcctactgatgaagaaaggaaaagattacaaagacattgtttacaaatgttatttatgaatgatacaaataatgatgatcaacaacataaacaacaacaacaaaaaaagaaaaagaataaaaagaagaagaaaaatggtgtaaatacttttaataatgaaataagtacaattaatcatgttggttataataatcctgcaaatactgattggttatgtgaattatgtgaatataaaattgtttatggagaaataccaatatttttaactgaatggttacaaaagaaagctaataatcaagaaaaaatggaaaattatcagagatatttattagcacaaaggaaagagcttaaaagagagcaattacaaaggaataataattataatgataaacataattttaatcataaccatcataatcatcatcaaaattgtgaacatgatcatgaaaatgaacatcaatatgaacacgatcataatcaccaacatagtcatgaacataatcataatcataaccatgaacatgagtgagtaaggattaacacactgaaaaatgattttattatgatgtttttataataatgtatactcaaatttataataacatggttaattacctaccaatcttgaaatatgttccatttccactaattcatttgtagaattttctaaatcagttttacttttactatcctttaattttaaactattcataattaattcatcagctgcgtcaccatctaaaagttctaattgctctttaggaaatattcttggaaataatattggaactaaaattaaaattaacattaaaacacctgggaatccaattgctcccttagtacatgtaatactatattcacctgcaaatgcaagtaattctaataccacgtaaattttaaaatattttggatcagttttgaaatactcaacagggaaatctgcaggtatgatatgttcaatttcatcatcagattgggattgactattacgatcattattgttagattctttagaagtgctattaacttttttaacggtatcattctcattatcgtccctaccaaaatttgattctacactgttatagttatcatcatctgcatttgaactattctttaattttgtcctgttatcatcatcaataacgattttagataatttagttttccatagatcatcagtaaatataaatcttaatcttctaacaacatcagttccatcaattgttgtaattgccataatccaaaataacccagctaaaacaccttgaggaatcaatcctaaaacaaccaaaaatggacgtgtcatcataactaatgtaattaatccttgaaatgtattacttaatctctgttcaacaacttttgtaattttattaataccagttttataatcatattcataaatacataatgaataagtatgtaatggagcttgaggaattaacccatttggagctgggataccaattaaacctgctataccagtagtcacaccaagtaagaaaaaatcataatggaaggaagcaggttttttcaatgggaattcagatgattgacacattaatgatgaaatattatgatcataataaaataaaattgttaaaagaattgcaaatggtatagctaaaaagacttgtccaacagttatatcttcccagaaatggatcaaccaattaggacctctattaattgtatcagttggatggaaacttctagtaattggtaatctagggaatttaacatcatctaaacgaccaccaaaatgaataaaccctgtaaagaaaataacacatagaggtgtactataatctttaataaatgatctaatattatgagataaataatgtgattttgtaccaaacatttgagcagaaattccaaatatagccattatcaaggcaagcattattgatgcaaatgcaccagctgtatcagttaatgagaattgatgagttaaaatttgaatacctttttgaatataaactatattaataaagaatccgaaaacatcacatgagaatttagtaacatatctcataaaattaacactattagtaaatgctaatataaaatggaataacattgaccataagcaaatccaacacatgaatgggaaatatggtatattcttcggtacgacaatttcataaactgtataattgaaaatagatattggacctgtaactccaacaatacataatggagatcctgcgaaaagtccaaacacaataccacccattgcagatgcaagtaaaacttcattaacaccataagaattattagtatgatcaaacatatcttgagcaaatgccaatgcaggcaataaatttgtaaagaatatataaactgtggatggaattgtacgatatgttaacccatcctttatatcagatacataatatttgattaatctatccttgatatcataataaattcccttcccagtgtctcttaaatggaaaagctgattattcttgtatgagttgattctttcattgtaccatgcagtaaatgacatgaatatttatactattaagcgtatgtataatgagaataagaacctatattagattctttgttgaaacaagtattcaactctactataaatgactgtataagatatacactatattaaaattcaagggcttggaaaaagagataggcacatgtcatgtatacatgaaaatttaatgaaatgaaaaattaatttttcactattattatcagtgatatatcctttctttatttgatcaacaagcaaatgttacgtggtattaagacctccaactacattcttcaatcgatcagatggaactccactaatggaccaatagcaccatttgcaactccagattatcaaggtagaaaacatgttacatttgataaaaatatgccatcatatactaaaccaaaggcatgggagagagatggacaagataaggaaaaatggtttaaacgtaaacatgcacatcatcatatattacaaaaaccacaacgtgagaatactcaacgtaggtatgatggtattaaaaggaaaaatcatgaagaaagaatggaaaaagttaaagaaatggaaaaaataagagaacatagaacaagattaagacaaattggttcaaatcctaatattgatatgcttttcggtactaatgcagttttagcagctttaaaaggtgataaaagaaagaaatttggtaaattatatattcataatccaaaggatagtgaaaaagttaatgaaattttacatttagcaaatgagaagaatgttaaaataacggaaacttcaaagcaagatataaatcaacttactgataatgcagttcataatggtattgcattagagacaaaacctttagaaataacagaaattaaaagtatgagttctaaatttgatgaagattcctttaatattaatattagaaatgaaatttccaatataagtgaagataaggaaattccattagatacatttggtaaaagatatccatttggtatttatttagatgaaatttcagatccacataatgttggagcaattttaagatcagcatatttcttaggtgcagattttatcgttttcagtgaaagaaattgtgcaccattaacaccagttgttgcaaagtcaagttcaggtgcaatagaatttttaaatttatttaaagttgataaaccattaacattttttgaagaaagtaaggataatggatggagtttaatttcaacagttgcatcaactggtaaaaataagaagaaaagttcattaattgatgcaaatacaattaatgaaatgttacaaactcaacctgttatattagttattggatctgaaggtgcaggtattagaactaatttaataaatagatctgattatttagtttcaattgaaagtggtagagaaatgaatgaatgtgttgattcattaaatgtttcagttgcaacagctttattaatttctaagatattaaaataacggggaagggaatgtatttaataataactagaacatcttgtaaataaatagaatatttatcatgtatagtattcacctattaataaaattaattttagaatagttttttttcttatatacactatatacaatatgagttctataaataatagtattagtatactaatactatcaatttttattagaagtttcttcattagcattaactttcaataaatcaagaatatctctcattaatgaaggatcatttgcaggtcttgaaactgaatttttcatttgaatatttgatgatgaaattttagtaacaggaacggcatttaagtttaagtttttattctttaaatttaaagttacattatcaattaccaatggtacttgaacttgtcttgaaaatttattttcatcaatcattttagtttgagatactaatgattcaacataattatcattagcagcttgacgtgttatatttgcaataaatccaccaattgcagcttttgaacttgaagaattattaccaacaattctaccaggaacaactctatttgatttaacaccatttggagtttgaaataatctaccctttaaagtataacttaaacctgcagtacctgataattgattataagcattttcaggaatttcatttttatttgcattatttgataattttaaattttcagattcaataaaagatttaaaatatgatgataattcataattattagtaatttgaatattattaattgttaaccatttaaggaatggttttcttaaatttttcaattcaggtttaatatttttaataaaattaattgaatttaatggttgattagtaatatctaaggtaccagaaattaattttgattttgaaaattcttttgaactttcaaagagaggattttcacatttaagtaaagaatttaaaatatcaggatcattattatttgaatcattactattattattattattattgttgttgttgaaaaatctttgatttttattattattaagattattattattattatttgaattttcattatatgaagcatttacaggtatacctaattctctaaatcttttctttaagaaataatcaccattaagagtttcaaaatttggtaaaccatatttattatctaaatcattaacaataattcttctagttttaattttttttggaattctcatctttaaaccgaaatctcttctagagaatgaatcagttggagcttcaataatttgatgagttggtaatgaactatttgcatttaatatactatcaccaattgaattttgtaattgaggaattttagtgtttttaaacaatctgcccataacggacatacttcctgtactcttggtcattcttgagggggtgatatataggactcagaaggggagatcaaccacagattaatgaatattataaatacctattcctctttatacctcctacattgaaattgaaaaatcatgaattgagagagagagtgaaatttaatttttgaaaagaaaatctcaaggaaagttaccctctctttaaaatttaaaataaggaaaaaagtagacgcatcgacgttaaaaaagagggcaacttgcccttttttattttacgttaaaatgctcagccgttgatttaagtgattaggttttagtaaggagtatacacttcttgatttgcttttcaaaaggtatcagggtatattcatattaatcaatacatacactggatcaaatccattaaggaagtagaggagttgagttgagttattttatctacaaaatctattcacaatctttcatcaatgtcgtctaagaagagcgtttctcaaaaatataaacttctagaagtcattggtagaggtaaatttggtacagttcataaagctatcgatgttgatagtaaacatttaattgcaattaaaattttaaatttagatactgataatgaagaagttaaagatattcaacaagaaattggatttttatcaaaattaaagacagctccaaatattactcattattttggttcttatttaaatggtcataaattatggattttaatggattattgtgctggtggttctgttagaactttattaaaacctggtcctttaaatgaaaaatatatttcaattatttctcgtgaattatttattgccttacaatttattcatgaaaatggtgttattcatagagatattaaagctgcaaatattttaattagtaaagatggtaaagttaaattatgtgattttggtgttgcagctcaattaacttcatcaaaggtaaagagaacaacaatggctgggactccctactggatggcacctgaagttataagagaaggtgcaacatataattcaaaagctgatgtttggtcagctggtataactatttatgaaatggcaaccggtaaccctccttatagtgacaaagatgccttaagagtaatgcaaataatcactcaacatgaacctccaagattagaaggtagacaatatagtgcattacaaaaggaaattattgctctttgtttagaggaagatcctgaattaagaccatctgctgaaactatattaaaatcaaaatttattaaaagtagtaaaactttaccaactacaacattaaaggaagttattggtaaatatttggtttggagagataatcggaataaatcaatttcaaaacaaaataattcaaatttaagtaatacaaatttagaaaatgctaatgtcgaatcaaatagattaaatataccagaaaataaaatctctcatcataaaactccttcaatggtatcattaagtgaatcttatataagtatggatgatagtgaaaatattaaatgggattttgattctttaaaatcaacagaatatattattgaaaatgatattgtattacaaaatgatgataattttaaatttgaagattcagaatttgatattaataataaagatgcaacaaaagattttactagagattttacaagagattttacaacttctccctataataaaacttttacaattggtaatactttaatgaatggaatacataatgattcaagaattacaactgcttctggtacagcctcagcatccaccactcagatagattcaattattaattcatttgatcaagtacctaaaattattaatccacctaaatcacttgttgatttatttcccgaatctagtagcaacaataataataacagtaataacaataattatagcggaatttataatcaagattcgactaatagtatacatctgaataatgcaatcattgatagaaacacagataaaaatataattgataataatgatcatccaaatggtttcaataataatgaaagaaaaaattcaagagttgaaatacagaattatccagaaattgatcataatggatcatattatcaacataatgatgaattaaagaaagaactattaggaaataattcatcatttaatcaaatgagacaacctcaaataacttctccattaatttcgattgaaattccaaatatggataatattgaaaatgaaatccaagaaagggaaaagcaaagatcaagagctgcaaccgtaactctaaacaataacaacaataacaataataatagtaacaataatatgaacattaataacaataatattaacagtaatagcaatacccatattgttaatccaattgataaacctgatctgggcacacatttaagatatgaatctgatcaaccattaccaatgagaaaaccaacaatttccttagcatacaatagaactccatcacctgcaaggatgttagaacaaatcaatacaaatttacttcctaattcacaagaacagacaagtccattacatatgaaaccattaccaattagtgctcaaccattattgcaaccaataaatggaactttaaagggtaaaccacaaatcaatttatcgaatatttccaatcataaagcagtttcaaataatggtccacaaactgctcctgttgtttcatcatcgaatgctgaattatttgattctgctttgaaatcacgtaatcaaatgcgtatacagatgccagtacctatgtcagcaaccgcttcatcattcccaaacataaattctaataataatattattattaatagtaataatactattgaaaaaaatcaatttggttttgaaattaattcagcttcaactgttccaatggcaatgacaccagttactgaacgttcacaacttggtcattcaacacctgaaaaagaattatataaaagagagatttcaactgaaggacattttaataattcgaattcaacaaattcatcattttcattaaatactaatacaaatacaacatctaaatcaataaattccgagaatattatgaaaaatgaaccaactataaagaagattccatcaactacaaaacatgcaattagtccaagtagtaatttgaaaaatagtgtaaaatcaaatactaatatttcaaatatgaatataaatatgaatttacttggtaataaattaaattcggcgagtgtttcaacattgaattctacaaataatagaaataatgattcaacaacaaatcttgaaagaaagatgtcagttgactctaatcttaaatttcaaccttcattaatatacccacagcaatttaatcaacaaaacaacgaaaatgaaaaccctaactcattttctaatctaaatgatggtagaaaagataaagataaagagaatgataatgaaaagactataactggattaggtatgatgagaatcaatgatagtggtaatgtgtcaccaatgaaggcagcaagtcattatgataataaaaaggaatatacattacagaaatgtgtgaaatcatcacaaaagagtttagagaagatatccaatcattgcattactttaactggtattgatacgaacaatacgttatctaatgcattgtacatcaatgaaattgagagtatgctggacaacatgaacagtgtattggatgttatcgttgatgaactaaaataagggtatccgatatgcgacaagttaaataatttttttgtgtaaaatagacgaaaaaacgggtgttttttgaaaatgttttttttctttttgaaaccattcagatatatgtaaatttactagattaactataactgtaattattcttcttctttaattgatgataaatgatggtaaaattggggttattttctcaactgatttaagaaatgatgatacattcacccagaggaagttatacacacgattggagttgaaatcatctgaattgttgaattacgagtttaattttaatgatccattgtatgaatacgttaataatggtaaaataaccttacaaaatactgatgagatcaatatttttaacaaatttaatattgagttagatatattagaccctcagtttaatgatattgtacaatatcatgcagaaattgatgagagtattattgatcaaataatgaataataatttattaatagggattaatcgtgaaatagttattatatggatattaggattgttaattaatggtaaatatgatattgaagatagatataaatttgaaatatttaatgaaaatggtaattattactggaatattcgaattttcaataatggattatttaaaatattaacaaagattactttaaataaggtagaggttaatttagatgatattctccttaaagatttagaatatttttataatgaaaataaattatttaaaagtaaagaaagaaattgggaattagaaaaggaaaaattttcacagaatatatttttaataaaggagaaggaacaattgaataaattaaaagatagtgtaaggaagatgagaatgcaaattagtggatattttgtaccattggttaattctttattaaaggagaataaattgttaaagggggatactggtgatgttatattttcaagtaagaaaagaaagaatgatatagaagagatgaaacaagaaatttttaaagaaatggaaattggaattaataataatgatgaagatgatgaagatgataggggtaagaaagataagtttttagaattggctcgtaaggagaagaataagagaaggaagttggaaaaggtagagaatgaaaaagtagaggagataaaacctgaagaacacgttaaagagacaaactttgcaaataatagtaatgatttagaagatgatattgtgtttcttaataaaagagaacatcatagtattacagagacacaatctgattttataacggctaattgtgaagttaatgaaagtatacaattaattacattagaaaatgatacacagattgatgacgatgataatgataatgataatgatgatcaaaatgaagatcttgatcaagaaactgatatttctgactatttaattgaagaaaacatagaatctgatgaagaaactgattattctactgaagtatcctcttcaggtaatgaatttgattaatataaaactgaatggtgggtatatgagatccatcttttactataactatttttagaaacatattgaatatttttaccaaattttaacagaccagctgatttattaattgatgatatctctgatttaaaatcaattagatttaaccaaggtttattaaaattctcaattgatatattatttggtaaaatattatcaattatattattcatattaggtaatggatcatttcttggttgtaaatcaatcattgaacatattttaaatcttgatattgaagctaatttgattaaatttatgtattgagaatctatctttttgaaaatattggaattttgtaatgattcctctaatcttaatttaaataatgaatcaaataaacaattatttgatatacatccaatacattcaatacattcagcatatctctctaataggatatcatcgaatatatcaatttctaaatctgaaacatctttaaatatattgttttttcttattgaattgatttgagcgtatactaaaaggtatttaggattagttctttgctctctcatatatgtagttttaccatttaaatgaattggaattcttatattaaaatccggaagggtggaattgatatttatattattgtcgtattgagttggtaaactttcgaatttttgtgaaaatgtttctaatggtatatcttgaaatattttcatgttattgaaatgattggaaactgaataagttaagttaaatgaattattaaaattatgaatacaatctgatattgaaaatttattatcattattattgttagcaattgtgggtatactaatggtatttgaagaattatttattaaactatctgtgtgaaattcaagtgattgattttctagttgattggtattatcattttgagtttcatattcattatgattattatcatcataatagctgttttttcgtatttgaagaggatgataattatcctccgttaggggacaaatggatgtaaaagaagatgaatttgataatggatcttcaccattcaatatgaaacttttttgaaaatttgaaaaagaactagcttttttcaaagaacaagtagatttaaatgatggtgttataatgggggatattgaagtatcattataacttgaaactgaactttgtcttgatgaaagcatttgtgtataagaacttgaaaaacttgaatgtgaagtacctaaactacttttccttcctaaaggtgtggctgctatgttactaaatgtgaatatattttcatcctctataatattttgtgataaacctttcctattaggtttaacacttatctgaatcggagatacttccactattggtttgggtactttaactattccctccatggtgtccaagaaagaaagagtgaacaaccaaccagtatcataactctaacaagactatacctatataatcggaaaacttccccgagataagcgacgttgagatcggaattacccaactaagaaaaagaaagacgccaatgcttaaacccgcactctaaaacgcagaaaagcttctctggtgctaatttagtgccatttccagtgaagtagggcttctttaacggttttttcttcttagcttgggtttatgggtgttcttcgtagagtgttgttgaagagtaaggacactgatgataggattggattaagtgacacccatttcacatttcccaagaggaaatacggtactcaacagaaacaaataggtcaaggtgtctctggatttgtacacttgtatcaaaatgagaaatccaacaccttctatgctgttaaatcatttgaaaagaagaatttgaaagatattgatgaaattaaatcaattaacaaggaaattgatattcataatagaattaataatggtcctcatattgttaaattaattgattcatttaaattaaagacaaattctaaatttttcataattatgcaatatttaccacttaatttacttgatttatatttaaaatatggatctttaatgccaatttcttacagattatgctttttcaaacaaattgtattaggaatcgcatttatgcataatcaaaacattgctcatagagatattaaacttgaaaattgttgtgttgataacaatggcaatgttaaattaatagattttggttcttccactattggtgatattggttacggtatggcaggttcaccctcttattcttctccagagatacataattctttaaaatataattcaattaaatgtgatatctggtccctagggatagttttaattaatatgttttatgcatctaaacaaaaatggaatacttgtagatatgatgatgaaatcttcttatattatcaaaataatccctctattgacaatgctgttaggtttttaaataaaaatgatactaataatgttaaggagtatacttcccaaaagaccttaatcgatgatataatcttacaattgttgtccattgatgtcaatacaaggatatctatacataatttattagaaaataagtggtttaaagagacagagtgttgttatcctgataatgatctttataaggcttaccacaatcattcacagtttgtataatagtaaaagtaatagtaacagtagaataatgatagatataagccatgaagtaggcgtaaacatggtaacaggtaatttttatagtctcgaattgtcatatacaatatgtaattttattattttatgttgatgatctgttgatttatttcatttcattccatccagtaaatacatacatagagtaatggccactgctacttctagtgctgatctattgaatgaggataaagttaaatccattctagcatcagattcaagttttgaaatcttatctcaacgtttaaagcaaagtattaaagcttgtgatgaatttgcttcatttattgctagaaaatgtcattctgaacaaagatattcaaaggatgttttaagaactgttaatcattgtgatcattcaataacttcaaataatattgtagttcaaggtacttttattcaaaatttacaaaaagttataaaatttgatgaaaagataaatagtgttagagatccatatatctccgcattacaaaatatggcaaatcaattagaatctttagttcaacatttcactaatattaggaaacaattaaaggaaaaaggtaataaggcagagagagaagtttcagattctattaatatggctaaaaaggctagaaatagatattggaatttatgtactgaattagagaaagttagaggttctgataaaaatcaaactaaaattactttacaaggtcgtaaaacttattctcaacaagaagaagatttaaaggctaaaattaaagatgctgaagatgattataataaaaaagcaaattcatctcaaagattaaaaaataatttagttaaaacaataagaccaaatattgcagatgaatttaaaaatttaataattgaattagattatgcaatgcaaattcaacttcaaaaatattcaatttatactgaaagtttaatagttggtatgggtaatcaagttaatccaattaatggttcggattcaatgaaaaaaattgcaacaagttctgatcttgaaaaatgtttatatttttatttaaaaggttcaactgttaaaactaatgaggctttacaacctgtggaatttataaggcatccaattgttggtggtatattaccaaaatcaactccaaaaccaccaaattctgctaattcatctcgaattaataatattaataataataataataataataacaataaaagggatatgtctattgcatcaaaatcaacagttggtggtgcaccagcagctggaatggttgccggtggtttaatatcatctactgtttcatcacctaatggttctgttaatagtaataaacaatcacaaaatatactttcaatgaacactaataataaattaccacaaataccatcacttggatcaacagattcattacctccagtttcagttccaccatcttatacatcattagatccttcaagtagtccaaaattaagtggtccaagaccattaaatttagaaggtaatgattcaacattatcatttactgataatagtattaaatttaattcagatatttcaactaataatattttaaataatgggaaattatttggaactccattagaattattggatgcaaatgatgaagctgttccattgtttgttattaaatgtatacaaataattgaaacttttggatcaaatactgaaggtatttatcgtttaagccccaataagatatcacttgaagaattaattatacaaattgataatgatccacataatttatcattattagatccaaaggatccaactaatgtttcatctgaatatatttatataattgcatcattattgaagaaatttttcgctttattacctgaaccattattaacaaatgaacaacgagaagcatatttacaggcagctgaattacccgatccaatagagagacaaacaaagatacatcaacttgttttcgaattaccagattcaaattattttacattaagagatattttaggacattttagacatttaattgaattcccaaaagttagaatggattctaaaaatatttcaattgtttgggcaaataatttaattggtggtaattttgaatcaagaggggaacttgaaattcaacaaagagttattgaaaatttaattacatttgcaccttcgattttcacttatgatgacatttaaattaaaaaaaatgttctcttatactatgtatttataaaaaattctattattattattaatagtattatataaaaacactttaattaattatcaatcttacgtttagctctttcccaagcactaattctctttcttttctttggttgaccatcattaccaccaacactcatattattttcaaacatactccaatcttcaccaaagaattcattacgcattctctttgcacgttctcttttattttcctttgttttagttgcaggtaatcttgtaaaattttcttcttcataacgttgtatctctgcttctttctccatttgtttctttgatttaatatctctaccattatttataattgttgaaccaatagatttatcagcaattggtgcatcactaatatcttgtaaatattcatccatactttgtaaatttcgttgttttttacttttaactggtctatctggatcattaattgcagttgctgcaatctttggtggtttatatttttcattagatttatttgatttaagttcttcctctccttgttcaagattagtttcagtttcatgttcttcttctaatttagcttctgccttctttgcaatcaaatgttgtttgttactatacaataaagcggatggatttggtttgaaattcaaaccattttcagcttcttcatcctcttcatcttcttcatcgtcatcatcttcttcctcatcttcattatcttcatcattatcttgttccttcttctttgcatcaatatcatcttgttctttttctcttctatgatatgcactaaccattttttcaagttgataacttgttttcttttccaatgctttgatacctttctctaaaacaatacgattagttgcagcagaatttaaaacatcttctttatttgattcataagctgagtcgcctttttcctctttaaaagattttaaacgtaatgaaaggtataatgctaaatcagtaacataattaagtaatgatgcatttttcaatgataaaagtgaaacagaatctaaatctgaatctgaacctaatgttttcaatatggattttattaattttggaacttctttattatctggattgaaatcatcttcaagtttatctaaaactagtgatgttgaatctatagattctgcaattgaagataaaagatcatccaatactacgggttgttgtgattttgacatttccttcaataaataggatgtgtgatgttgaataaacccaagaaactattacaaaacagtaaataaatatattataaatttcacaataatcattaaattctcttagagacaaaaaaaatatttgaaatttcatgttaaaaaaatttttcttttttaagaaattttttaatcaaaattttttacttagtgatttctattgattaaggtagttaaaatatttctattttattgtcttttctttggatctttcaccttttaagcaaatagatatcaatcaaacatgcctcaaaacgattatatcgaacaacatatcaagagacatggtagaagattagattatgatgaaaagaagagaaagaagcaagctagagaatctcataagatttcaaaggatgcacaaagtttgaagggttggaagggtaaacaatttgcaaagaaacgttatgcagagaaggttgctatgaagaagaagattaaagctcatgaagaaagtaaattacaaggaccttctaaacctaaggaagatgatggtgaagcattaccaacttatttattagatagacaacaacagaatactgcaaaggcaatatcatcatcaattaaacaaaagagaatggaaaaagctgataaattctcagttccattacctaaagttagaggtattagtgaagaagaaatgtttaaagttattaaaactggtaaatctaaatcaaaatcttggaagagaatgataacaaaacatacattcgttggtgaaggttttacaagaagacctgttaagatggaaagaattattagaccttctgcattaagacaaaagaaggctaatgttgttcatccagaacttggagtaactgttttattaccaattttatctgttaagaaaaatcctcaatctccaatgtatactcaaatgggtgtgcttacgaaaggtactattattgaagttaatgtctctgaacttggtttagttactgctggtggtaaagttgtttggggtaaatatgcacaaattaccaatgaacctgatagagatggtgttgttaatgctgttttattagtataagacaattacaaatttcatttatcttctctctctatctatatctctttctatgtacatgtataagtttgaattttaaatacggttaagtttttactatataagaaaccaaaaaaataagtattaaaaagaaagttattcgttaataatctatcttcatcttaactgctaatcaaaaatatctttaatacaagagcacggcgggactcgaacccgcaaccatccccgccggaagaagacatgctaaccattgcaccacgcgccctcgtacacagcccgggaggtcatttaagacatacccttagtttttcaacttagcggtcacgtgatctatgtgattatgtaagcagattgatgatgatagtgatgcagctgtatataaactaataaggagttttctgttttaccaggttaccgtaaattttgtgatcgccagctaagccgtacatagccagacgctaccagttacttgttaaaatgctggcttaatacaattgtttatgcattatttgagacactatttctaatcctctttgtctactactgtttaaaatgtaatattgtagtgacatcttttataattgaggtgaaaccatgaatttgtagttcaaaaaagtctcattatttggattaatgatgaataactaaaactagctcaacttttttaaatttgaagaggcgtagtttgaatcaacttttttatttcttgacaattaaagtttacgtttcttggcttccctgaattcactcgattaatataattttcaataaaccccagcaaaattaaatactttattagtgtaaaaaaaggattaaatagataaagcaatcaattaaccgctaagtttggacgaaaatgtattatatgtggcttttataggtaaccaaaaaagtttaaaagagtcatttttacattatttttttttgtaaaaaaaatggcttgaaaaaaatttttgatgttttcaaacattagttagctttttaacttttaaggaaatgaaaaaaaactaaaccgttatattggaatgtattgattagccttcaacaataaaatttagatttgacacatataaagtaaaaaatacttcataaacatgctaccaataatgtttttttaagaaaacgtcattatttttataaatcacgtgactacaataaaatctatctgaaaaactgttattttttattgtcaataattggttgtatagtgtagtggttatcactctcggttttgatccgggcaaccccagttcgaatccgggtacgacctttacttttttgaagttctttgtttcattttttctacctattgttagtactaacttctgttgtttaattaaaccatttaaacactttaacatttactcgaatattgcaagagattaatcacagttgaagaaatcagttgtagaatttgaaaaaaatacaaaatttacgtgtctttaaactgtttgaagattaaagtgaaattacgcgatttgaataattaacatgagttaaaaattattgatttattgattgtttttactacattagtgaattacttttggtatgttatatagatgatattgaattggagttaaataatagaatatctacaaaacaatggagaatagtaacaataataagaaaagaaaagaaattgaagaagaaaatgaggaagaaggtacagataaacaaccaagattatcatttttctataattcaagtgcaattaaaccaaatattcaaagagagagggcattagatgaaattgatagagttgaacaattaattacattaaatttacaaaaaatcaatgaaaatttaatgatttctaataatgttataagtagtaaattaataccaacattagaaaaatttaattcaagttcaattaaattatttaataatattaatcatataaaagaatttttcgaaaatgcagcaaatgttaatatattaacaaaaaaagatgttaagttttctgataatgaaaatgagaatgatggtaatgatagtaattatttacagttaagatcaagttcatttactgaattaaaacatgatagattaactagttcagataataatttatcacgaagtagttcattagtaagggttaatgatgataatagcaataataacaatgtaaataaagaaattattgaaccaactatatcgaatttgaataatacgagatctttatttgatggatttaaagttaatatcgatgaagaatctactggtaaaaatccagtacaacgtaatgttaatgaaagtattgatgatgaagagtttttcactataaatacattcaaatctgatgatgagcgtagagaatcaaatgagaaagagaaagagaaagggaaagaaaatgaaaaggaattagacgtagaagaagaagaaggaggtattgagagtgaagataaatctaataaatttgttaaagatttaatgagtggatatgaatctccaccatgggaggaaccacccgttttacaatctgttagatattctaaacatttacatcataaacgaagaagtgaagaaacaggaatacgatcggatgaaagggaagaaattaataataataataataatgaaaatgatgatgataaagccaatgaagtggataatgaagaaagtgatgaagatgttagtataaggttcccatcatcacctaaatatggaggaggtggtaaattattaagatctaatgaaggtagacaaattgcattagattttgcaagaagtgaaatgatgaaagaacatccaatactttcattacaaagggatagtactaaatctaagatagcaccaattagaagaatgcccactaccagtgatccatttcgaagtgatatagatgattccagcagttcatttgaggatgtaccggtgttagagagtgaaaagttacctaaacgatatcgctgattacgtaatgtactattttttaattggggcacattaagtcattaaatttgtaaaaaagtgagaggacccctttaattttcatttgcctttgtatttaactttctttcttttcttttaattcttttagtatacagccaatgatatttcaaataaacaacagacacaacaaaagaactaactttaaaaacaactacactgttaattcagttttatatcacctttctaataattttaaaattttgttcatttcattattactaatactgacaacaggttacattatatcagctcatataccgtataacaaacacccgtcattatcttatccactgtctcaatacaatgttgaagaattctctatgagtacacattacagtaatcattataataccaataataataataataataataataataataataataataataataataataataataataataataataataataataacaacaaccctgattcttttcccaaaaatcatcaaactacaacaactacaaatttcatgaaaccaactgatactaataccgataactcacatgagagtatatcttctttcaatcataacaatgtactaatatacggaccatttgaatctcaaccaagtacacattttgaactatacaatttcaactcattaatgttagttgcaatgctattcatatcttgtttcctattattatcctgatcaccctaatcaacatcatcaacgtcatcaactccgaataatcaatattgttgccataatcaataagagatccctgataattacccgtttaggaaatccgcaccgcttcacaatagataataaatatttttttgattcgctatctcttacccttcactctttagtagtgagacacttttgcaatattgcaaaacacatcagttacaggtaatattacagcacacaagtactttattggttaaaagaggatcaacaaaagtgaacacaaaattgtcgacgaatttcaattagagaaaaaagacaacacatattattttcattatatttccagtattatatattccttatctataatttatcaagatggattataaacaagttgctatcaataaggcaaaatctttaatcaatagtattccaagtgaatggttattagataatattccttcaccagaggaacaacctaatgtaaatgaatatcttgattcaattttacctgaaaatgaaaaattaattacttcaagcaatgcaaatgatttattacatttacaagagattggtaaattaactgcttatgaaattacttatgccttttgtcatagagctgcattagttcatcaattaactaattgttgttctgaaatttttttcgataaagcttttaataaagcaaaagaattagatgattatagaattaaaaacaataataaattaattggtaaattacatggaattccaatttctttaaaagatcaaattaatttacctcaaattactacatcaattggttatattgcacctcatatttctaaagaatttgaaaaaattatcacaaatagggatgaaaatcaaaatgatatttcattaattgctgaaattttacaaaataatggtgcaattttttatgttaaaacaactgtaccaatggcaatgttaggtggtgaaacttcaagtaatttaggtacaacattaaattctattgatagaaataatgcatgtggtggatcatcaggtggtgaaggtgcattaattgctggtaaaggttcaattattggtattggtacagatattggaggttcaattagaattccaagtgcagttcaaggattatttggtttaagaggtagttcaaacagattcccatatttaaatattgcaaattcttatccaaatcaaattggtgtttgttcagttgttggtccaatgtgttcaaatattaatgatttaattcatgttagtaaagttattttaaatgatccattatgtattcaagatccaagatgtattccaattaaatggagagatgatgaggaagaagaagttaatgataaggtaactaatattggatttttaagatgggatggagaaattttacctcatccaccaattcttaataatattgataaagtttacaatattttaaatggtaatgatgattttaattgtcaaataattgatgaaaataaattaccagttaaattatcacaattaggtaaattactgttaagtttttataattgtgataattttacagaaatttccaattattgtaaattaagtggtgaaccattaagtgaattatttaagagaagttttaaatttaaggaagataatagaatggataatgttgaagaatttttcaataaagttaaattaaaatatgaatatcaattaaaatttgataaattatttaatgaattaaatattgattgttttattatgccaagttattcaacagtttgttggaaccaaggtgataataataaaatttctaatttttatacaagatcaattaatgtattagattatacagcaatgacattcccagttggtaaagttaatgagaatgatgtttcatttcatagagatgatgaagaatttattaatgaaatggatgaaaataattggaaatattttaatttagctaaacaattaggtaaaccagttacattacaattaatttgtaaaagatataaagaggaggaatgttgtagaattgttaagaagattattgaattgttataatatttaaataagtagtttaattgcttaaatttttgaaatttttatacacacataaaacattagataagtagacataatataatataatataatataattgataattaataattgataaattaattagattttttttcatcagaagttatataaactctatcatcaattttaccttcaacatcagatctaatttcatccattaattttgattgtttttcccaagtttttttatcaattcttttatctttatcaaataattctgcatcaggttctctataagaaccacctaatctatcccataaagttgtaaattgaccataattataattaaaataaagatgatgaattgtatgacaagcagcaccattaataacaggatcatttgataaatattcaccatcatgaatcataacagtccaaaaattaacaaatgtaaataataaaaggtaagaaattttatgtaatgggaaaaaaaatgggaaccaatgataaggtaatgattggaaataaccatcaactggatggaaagcatgagaagcaaatggtgtacaaacaatccatttatgatgaggtttatgtaattttttataaattggaggataatgtaaacctctatgaataaaataaataccacaatcagtaaataaaataaatgaaggtaattgccaaaaaattgctgaccaaccaccagttgaattatcaatattccaatataattttgaataaccatgaagttcaagtaaaaaccaaggaactgttaaaagaaccataattggtatagcagttgaagcttgtttaatttccatataaatttgatttttcaaatatcttggatgattaaaattagatttatcataaacaaatgtgaatgaaatccaagcaactataaaataaagtaaccaaccaaataatgaagttacaaggaaaagtgaaattgtttgtcttataaaactatatcttggtaataatgatagtttggaataaattgtttcatttgggaagaaatgataaattgcattataaccgtaaatttcattttcattcttatttggtaaaaatgaagttaatttattgaaaattggattattatttaaattttcccaatttttatcaatattggaaatagctgatttaactaattcaggagtttcaggtatataagattcataagattttggtaaaattgttgcataaactttatcaaagagataagtatctaaaacttctaatattaaatccattattgactgatttatagattgaagattttaaatttagataataaaataattaataagaatgagtaagtaaaataattatcaataataagtaggaatattagagataagttgaagtatttatagaagtaagataagtagtttaaaatgaagataaaccagttaaataataaataaaataacctgataatactataggaaaagaatgaaatgataataaagtatcaacattaaatatttcaattatgaaatgataataaagagatatttttttcaattttcatgtctcgctttttactatggggcgtttttttatatggctatacgatcgtatagtaattatgtcgtatagaggttatacgatcgtataatttatttatttgttcaattcaccgataaattccggattacgtaagtaagtgtattacgtaagtaacaatagacgtatcgacccttctattagataaggaaagaaaaaaatttttttttatttttcttttttttttctttatttacttaaaaaaataaatttttcactattataatgcattaagaattatcagatctctttactttactttactttactcctctctttaaggcgagcaattaagcaaggaaccctcatcaatactattataaaatgtccgctgttaatccaaaagctttcccattagcagattctgctttatctcaacaaattttagatttagttcaacaagcacaaaatttaagacaattaaagaaaggtgcaaatgaaacaacaaagactcttaatagaggtatctctgaatttattattatggctgctgatactgaaccaattgaaattttattacatttacctttactttgtgaagataaaaatgttccttacgttttcgttccatctaaagctgcacttggtagagcttgtggtgtttcaagacctgtcattgctgcttcaattacaactaatgatgcttcaactattaaaaaccaaatttatggtgttaaggataaaattgaaactttattaatttaatttaatctaagtatgcatactctttatagaaagtaataataataataataataataaccaatcttacgtaagatgtcccggagattctagtctttaataaagcagagagaggggagcggagaaatgaaaataggaaataggaaattgtgaatttttttgacatgaattgcattgtattatgattcatttgcaggtgttttcattatagaggggattaccgtgttcggagttgttgaatccgttgaagttttcttatcttagatctcagttattataaatactaccctattgtcctacttttatttgtaaatcagttattattgattatactttttatattaacaaacaatgtttagacaatcatctagagtaatttctaaatcttttaaaaattcaaattcaaatttattcatctgtagattgaattctacaaaagtttcaccagaaccaacagttgaatcatcaacacctaaatcaacttatagagttaatgataattccacataccctgaagattcagctgatgcaacttcaacaatccttgcagatgcaatcgatttccaaaaaagaattcaattaaaggatagagttacatggtgggaaattctacaaaagaaaaatttaagaaagaaacaaggtaaaaatattgattcattaacaattgatgatgttaaaacaaataaaatttttgaaaagacaagagctgattctttctcatacattactttaccatttaaagatgatttatcattaagagatttttatattaatgctgctggtagattaagatttggtcatttattccaagatttagattctttagctggtagagttgctgctaaacattgtaaacctgctgaaccaatgaatgttactgcttcaatcgatagaatttatgttacaaagaaaattgatgaaattcataaatataatttcttaattgtcggttatgttacctatactggtaattcatcaatggaaatttgtattaaaggtttctcatatgaaactaatttaccaaatgcatctgatattaatccttcaattgttgaaaatcaatcgaaaaattgtttcctttctgctaattttactttcgttgctagaaatcctgcaactcataaagctcataaaattaataaatttttaccaacttctgaatttgaatgggttgaatttaagagagctgaatctcataatgctgcaaaaaaattaagagcaaaattaaattctcttgataaagtaccaccaactgcaaatgaatcaaaaatgattcattcactttataattcatcaaagaaattattagaaattccgaaaaatgatagaccgaaaaatatttattttatgaaagatacaagaataactgctaatcaagttcaacaacctcaatatagaaatagacatggtattatatttggtggttatttattaagacaaacttttgaattagcttattgtgcagctgctgcattctctaaaagttatccaagatttatatcattagataatacaacttttaaggctcctgtacctgttggttcagttttatcaatggatgcagaagtttgttatactgaacatatccatgaaattaatgaagattctaattctgctaaattagtttcaactttattagatgattttgatacatctgcaaataaattaagttcagattctcgtgaatttttatcagtacctggtacattaattcaagttcaagttaatacaaaagttcgttcactcaaagatgcatcaaattttactgaaagtggtacctttgtttatagtttttatgttccaagagatattgattcagttgattcaccaggttattcatcagttattccagaatcttatcgtgaaatgatggattatgttgaaggtagaagaagagcttttgatactgctgcttatgcagaacaattaaaattatatggtgaattagattaatttaagtatagtaatgtaattgaaaacgtatataaaaatttaaataaattaataagaaataaagtaaagtaaactagagtacaaagcaaaaattaaaaattaacaaaaaaaaaactggaaacttaaataaatctaaaatacatgtgcatatcctataaggcatcttcataatcatcattacttaaatcaaataattctgctttataagatttttcttccctttgaattttccttgataatgaaccactattctcaaatccaactaattgagcttcagatgacatcgaattatatgatgtatctctagagattttattttcatcttctcttagagtttctaaattattattgaattctttactactattataattataatcattaaataatgaatcatcacttggatttgaatttcttaatttcgataatttggggaaaatcatttgacttttccgtattttatcatcattaacaacattaacagttaataaatcatttgttgaaactgtaatcaatgaatttaatgaatctctagttttcaaattaccatttgatgatcttctccatgaattgaaaattcctgttggtttgatattattattgttattattattattattagtatttattaattgatcagtacttgtatattgatctgcaacattatataatttatcagttgttgccttttcacttaatgttgaatcatttgctgaataatatgaatcactatcactacctttctctaaatcaactaaatttttttcagctaaaatacgtgcagatgatgatgatgaatttgatgaattttgtttacccattggtgcaggtatgattggtggtaatgatgatggatcttcatcattttcattatttttcttgtttctacgttttgcacaacaacaaaagtaaaatattaaagcagctgctattatgaaaactattggaattgcaacacctaatccaattgccaaacttttgttacttgtatttgatgatttatcaacaataattggaacagcggatgaactagtcgatgcggaagatgtggttgatgttgttatagtatttgaagatgaaacggatgatgatgaggatgctgatgattttaatgatgaatgtgaatttgaacttatataagaagacattgatgatgatctcgatgatgatcttgatgaagaactatgaattgttgaagaggatctataacttgatgaactaattggattaccaacaatgtagaaacttaatgattgtttcatactattcattgaagcatttagttcaatttgtgatgaattaaaatcttttggtacattaccgataaatgtattatttgaataataaaaagttaaccaatcatcattataaattgcatcaattttagtttcatttttattttggaaaattgaatcaggtaaagtatattggaaaaatttcccattttgaacagttatattagaaattgaatcaacattgaaaattttatgtaaaacattaatttcataattcatgaaaactgaatctccataaatatcagataatgtaatattaacaactgtattattattttgatcattggggatagtacctgataattttgaattatcttcaatactaatccaagatggtccattaataatattaattgtattaatttgattagtttcaataactttattatctaaataaatatcatttaatggtaaatcaatttcaaatttatcattaggatttttcataattgtattattataactagttgtattttgaatataaagactatgaccaccaacaattaatctaaaatctgtataagcagctgaaaatcctgaataatcagttgcaattaaagttaaatcaaattgtaaacttggagcattaattgaattaactggtggtgaagtaccataaaaagttaatgaattttcatcaaagaaacaccaacttggtaaagaagttctatttgcacttttaccataatattgaataattttatttgatgaacttgaaggtacaataaatgaattatcattaaatgagaatttaaaagattgttcaggttgaataactaatccattattaccatttgtattacccattttaattaattgagtcattattgaattatcagggttattttcaatagatggttgatttgataaataaattgaacaagattgattaagtgaatcttcattatcagtaccttgtaatataaaatcatatttaccttcatttgaatttatattattaccataaaaagttaaagaattttcatcaaatgataaccaatttggtaattcaaaggcttgatatttaattggagaattattatcagatttaaaagtttgtgaattaattgtaaataaataattttcacctaatcttgcaatatcaggtaattgattattaaatgggaaaccattataaacataagattgaacttgatgaattaggaatgtcactaccagtagtaatgtcctggctagagacatgtatgtcatgatcatttatatatgacttttatctagtttttgaatttatgtaagggttagtctttgattaaaaagtagattaagacaaaaaaaaaaggatgtaaagaaaatgtaccaagaaaaggagaaggataggagacaaaattagaatatatgagatactagtattattaagttggaatacatcatagagataataataatttcaattaatttgatgaatacggacatttaattaaaattatgacatttataaatagagacgcgttaataataataataataataacaaacgcgatatttaaagacattgaaaaatttttaaggggttgagaataataatcgcgtttatattacgtgtaagtattattataaatattatattatattacgtaatactgtcacgtgacaattacgtaatattattatttatgacatggtttgatgttgtgttttatttttatttttagggtggtcgatgcgtcggtgtattatttttctaagtttttttaataatcattggtatataagaaaggagatttaatattaagttagtattctagtgatagatggttaataatatacaaacaggtaattaataatgggtaatataacatcaacatcatttgcacctgaatgtaatgaattaaaacaaaaatatgatacatgttttaatacttggtattcagaaaaatttttaaaaggtaaaggtttacaaaatgaatgtgaagatttttggattgaatataaggaatgtcttgatattcatttagctaaacaaggtattaaaccaatgttagaagaggcaaagaaagaattaccattcgatgaaaataataatataactgattctcaaatacagtctgagataaataaaaaatccagttagttttcattttattttattttattttatagaaaatttatatattccatatcatgcatgtacatatactaaagataatcatcaaaatcatctttgaaatctgttaattcattattcttactcttaataccacttctaacttcctcctcttcatcttcttcttcactactttcttcatcactatcatcatctcctggttgtgcaagacctggggtaagtcctttaactgatatataacctttagatattttatcattaaattcattaattctagcatttcttctcttatttgctaaaacttcttcacttcttaattcctttaatttattctttgtattttcaacttttgttaattttaaaatatcattctgtaattctaataaatcttcatctttattaactaaatcttttttctcaatttgtttaactttactattaataatatcatttattaaatcttcatctttattaattaatttactttgtcgtataattttttcattaatttcttcaactttctttaattgtttacttctaattaatctctcttttcgtttaaatttctttaaatctgttaaattttctctaaatttacctaattgtaaattcatctctaataatttactagctttatgatttatactatcatttttcttacctttatcaagttttttcttacttttgagaattttcttatcagttgtttgtaaatatgttgaaagtaaattatcaacagtgtttaatgattgttgtttggtcttcttgttcttgaacattgtttatgtctattaaagtcctactacaagatatataactaaaaagtaacatatacaaatcaagaataaaatttttataataagtaaagtgaaaaaaaataatttttttcatgttgaagcatgcgccacgtctttctcaatggctgtggcggtgttcatgatggtgttcatgatggtgttcatgttcatcactgtgactgtgatcgtgtccaatactaccacccatatgatcactacaggcacagaatgaggttggattctctaattcttcatcttcactttcttcgttttctataaaaccttcatttacagcatctaaatccacttttttaactaatttaataaattcaacaacttttttattatacccttcctttatactccaaagatctttaataccaaataacaacttattattattaattatatcatcacatattttttcttgatttatttgtgaatttgtaatcattaaactataccttaaaatttcaagattttgaataaatttagtaatattatttttattattcaactttatttcattattaacaaaatccttaatactttcatcactagtccttacttttagtttctcacatatacgtttgactaaaataatagaattattatcatctttattaataaattctttaaattctttagatatagtggattcaataaaccatttcataacttgatcatccgttttattaataatgatatcatcctcattgatcaatccagcatttaatttgaatgattgtgaaagatattcgggaatgtctaattccggaatcgtcgtcttgaatgcatggatccatttataaaaatcttcaagttccgttaacattgaaactctaaatgttcttctcttaatctcattctcttcaatgattactttaggagtattgtctatctttaattcattaactttctctattatcccgttattatcattcattattgtctataataataatatcaaagaaagaaaactcgtataaatagacaaccattgtagtaccatttataaatttcaattttgatctcattctttctttaagatcctatattacatacttttcaaaaaaatttttttttcatacaaatcttagtcataaagtcgttaaataaaaaagaaagaataatagaaataataataaataaataataaggtataacttagagttttgcaggtatactctcctttgataatgcatctcttaattcatttaatgataatgttaaataatatgccatttcattaacattataaccaaatgcattatctttataatttgtaatattaatatgtaaccaatttttattaatcatataagctaatccaaaaccttcaggtacaacaggtgaccatccataaccattaaagttttctgaacttaattgtgatgttgataaataccaatattgtgaatatgaaaacattgaattattgaaaaattcatcaattataagtgaaggtttagaaatatcaatcatttgctttaatccaaataaatgtctatcaactcctaaacctgaacttgcatttttaatatattgaccatgagatttaattgcatttctaaatgattttaatttttcatctattggaattgatgaattttcccaatctttaacaaattttaatgcttcatttgaaacacttctacatgtctctgttctacctttaaaatattttctagttgatgcagattcatatgttggtcttaatgtaccagtatatttataataagctaattgaattaaaatttgaataaaactatcaggtgatgttttaaataatttaatatcttccttaccaaatccaaaatattgccatgttttaatatcaagtgaattagttgtttccttaaattttacaagttcagtttgaatattatcctttaatgtattactaatttcaaaatctaattgtgtaaataatttttctttatttgattctccactattgattaaatcttcagtaaatttaaatttagaaacttgttcaactaaccaatcatttaatctaagagttggagtaccatccattttagaatgttcacctaaaaatccagaattaccattttgtgaaacgaaaatttgaattggtttatcaaaccatctattaaatccgttaccaaaccaacaatttttagatttttcttcaattgtaattggtgaattattatcaagacataaaacaaatgaacttttaaaaatatcatttaaatgagttttattctttgatgaaatttttaaaagtttaatataatttttataccaattatctctatttgaagatgttaaaataccaataggatttttatttggtccattattaattgaaattgatttaatttttaataatgatcgataaatttgttgaaatgttaatggttcatctgtaatttcatcatgagttttcaatttataaatataaccatttgaaataacaatcataaatctattttctttaccattgaaaattaaattattatctgattttaaacctggaattctacaattattaaacatccatttaaaactttccatacaaaatggattatttttgattaattcaggttctaatgattcatcttcaattgatttcataaattttaatatatttaaagttaaaacagctgattttaaaatttgatcattttcaattttagaatttggtataactctatgagagaaaaaatatgaaacaaatggtgaaactggatctctataatctaaataagcataattatcccaaaattcagataaccaatttcttttatcattggaaaattcaattaatttagattgtaattctttaccttcgatactattaccaaaatcatcaataatttgtgaatatttaataaattcttcatcattttcaccatttgcatataaaggtttaattgattctttatataaatttaaagtatcatttaatggaggaactgataatgaaggtaacgaatcttgatatttaaataattgtccttttgataaagaggaacttgatgatgtagcagtagtacttgttgtatatggagacattatatttgcaaatgatcttgtagtattattcagttttaaataattacttgatagactgaaaacaaactttgaatttaaatttttcgatcttgaaagtgaagcagatatagtcataaaaaatgatttattgttgttttactgtttattcagttggtttaaatttgaaatttaaatttgtgtgttataagataaagtttattataatttaccatctcatccattaacttttattcagggaacttatcttccctttatatacccttccagagatgaagatttctgccccgccaaaagctaagaatttcaccccgtcaccaactccgattccgaatctccgaggaactggaaaattgcaggggtgtcattacctaagcatcacgtgacccctatatttaatatttattattatcataagaattcatagataaagagacaatcactagccttaccttgccaaccacgattaccacttgcagatacgaggaatctacatgttggatcaacatataatgaactaacaataccaccttgatgacctgcaacaattgagaatggtacaatactacgatttttttgatttgtattattagcctttgattctaaatcatataaacgaatattatcctgtgaaccacataaaatatatctcttatttggcattgttgtaatacatgatacactacctgataatgttgggaatttaaatgtatccaataattcagtagttttccttatatcaaattgttcaactgttgaattacgtctaccaatgaaaattgtatcaccatcaactgaccatgttgatgacatacaccacggtggtgtaccatttggaacttgaatttgcataactctattatccctctctgtaattctagaatcccaaattgatacaataccatcaattgatgcacttaggaaaatatcatcacttttttgaactccttcatatttacccgtttgaattgcatctctttgaagtttttcaatatctctcttcatttcaatattatcatcaattggttttttcgattttttgtcttcatcatcatcattatcatcatttttgatatcttcctcctcctcctcctcttcatcatcatcatcatcattaaacagtgaatcaacatcactatcattatcatttgaattaattttccaatcaattgaactaccaataattggtctatattctaatgaagaaatttgacctgttgaattaataaaataatttaaatttttaccagtatttaaatcccattttaaaatttttttatcccaagaacctgaaagaaaatttgtttgatttgtatttgttataatttttgaaactggcattgaatgatgtaaatttttatttttaacattttgatcatttgaattatggaaataccattgaattgaaccttcatttgatttaattgattgtaatgtaattgaaccattatctaaaccacttaaaatccaattaccataattttcactacataatgaataaactggactaattttaggttcaaataaaacatcagttgatgaacttatagttgatttataaattggtaattcattttcccaataagaacataaaactccattaaattgaattgaatcaactaattgatgtttttgtgaaactgttaataatgatttacctgaaactgattggaaaaaatcaaattttctaataaatccatcatcaccacctgtaaacatccattttggacctttagtaaatgtcattgaataaacttgtgatgaatatggaattgcaacaattggattaacatcattaatatctttattaattgaagcatataaaagttcatctctaagagaatgtttatttgatgtttctaaatctttttgattatttaatatatcaatatttccaccttcattaggtgtatctatatccatttcctgtgtcatttgatgattgatttgttacagaatgtaaagagagttttgtatgaaaaattcaaacatactggaaaatactgatgaaaatggaaaaaaacaaaaaatccgcgaatttggtgataattgtggtacaaaattttcaaaatgatgaattaattaactactgacactttaatgtttcttttatgaagggagaacaactacacatatatgacagaggaaaccgttatatttacagaagatttaaaatatcaatatccagagactacacaattaggattaaataatattaatttaaatattcctaaaggtagtaaatggttattagttggaccaaatggagcaggtaaatctacattattaaaagttttagcaggtaaaaaattaattaaaagtggtaaattaagattatttaatattgatccatttgatttaagagtcaaaggattagaacagaaaactatagtttatcttggaacagaatgggcaaataatgaaataattaaaagagatattggagttgaagaattaattaatagtgttggaggtaattattatattgatagaagaaataaattaattgaattattagaaataaataaaaaatggagaatgtgtcgttgttcagatggacaacgtcgtagagttcaattatgtatgggattattaaaaccatttgatttattacttttggatgaagttacaattgatttagatgttttaattagggataaattattaaaatttttatcaaatgaaacattagagagaggtgcagttgtaatttatgcaacacatattttcgatggattaggagattggtcagataaaatattacatatagttaatggtagtgttgttaaaacatataatagagaagaaattaaatatgaaggtgaaccgggtgttgtacaaagaggtgataataacaataatgaagttaaaataggaccaattcatagtcttcatccattagcattacaatggttacaaactgatcatgatgagattatgtaagcagcagtgattacataatataattagaaaattacgtaatataaatataaaaattacgtaatataaaaatagaaaattacgtaatataaaattcgcggatttagcggggtaaaaaacccattacgtaatgtagggggtgcaattttttaacaattaaagttgcccttttattgttatgactataagtgagtggcaaaacaatcaacaggctcagtatattatttattttattcattttattcatgttggctgttttacacccccgttttatactttcttttcaaactttaacttctttccactttcttttacaaatgtatctgtatctggctccttattcatcaaggagtaagtgtatataattaataactcttttctattctattctatttcatatcatcttatccatactatttaacatacacccccgcacaatcattaattaatttaaatggaaatcgttaaaaaaggtagatcaacttcttgttatttatgtcaaaaaagaaaacaaaaatgtgatcagagatccccttgttgtacaaattgtcttaaatcaaaatctcaatgtattcaacctccaagatatggtgagaatttaattaatccaaaagatccaaatagtgattatacctctttccttgaaaaaaaaattcgtcaattagaaaaattacttgatttaaaaattcaagatactaaagataagaaaaaagatagtggcaagtcaaataataataataataatgataataatgataataatagcaatagtaatgtttcaactccttctgcctcagatataataaagacggaaaaaatattaaaatatcagaaaatttcatctctaataagtcaaccttcaactccaaatactaatactagtaataatagtataccatcaataaattcaaattcagatccaagtactccttcacaaattcatcaaataccaataattgatcaaccttatgacaattttatgaatcattattcaaatttatataaaacttccctattaagtaaatataacttaactgaaattattaaacttgatccacctcaaaaattagatataaaatttacaagaaatttaacttcattatattttaaaatgttacaatataaattccctttactaaaagaagatgaaattttaaaatttcatgatttttactattcaaatacaaataataatacaaataatgaggatgatgattttgacttcaatactgcaagattacattttatttatgcaatatctgctttactatacaaatcaactggtaaatataaaggtccaaatccttttaattttttttcaaaagctttacgtcatttcattttagcttcaaataaccttaaagaacttcaaaaaattgatttattaatattaatgtgtattttcctaataagagctgataaaaatacaaataatattttcttaattataactgacgcaattcacatatgtgttggtttaaaattacataaggctaaaacttatcaaaatattgataattctttaaaagatacatttatgagaaaattttggtgttgttatattctggaacgttcaattttaatttcaattactaaaaaatttattttacctgaatcaaaaattgattcaaatatacctttatttgattatgaaccttcaaaagcttttagtccaaatggtaaaacttattttattaatcaatcaattaaaatcaaacgtttagaatcaagatttaccgaacaattatcaatcttttctagtaataataataatagtaataataataataataataacaacaacaacaacaacaacaacaataataataatatcgttaacaacgttaacactaccacaacaggtaattcaaacagtaaaaattcatcaaaaccaaaatcttctaataaaaatttaacatcaaattcgaacacgaaatcaaaatcaaatataccacaaccaattcaattaccacaatcaaataataattctcaatcaactttaaaatctcatttaccaaaagttgaagttttctttcaagatttacagaattggagaactgaatgtcaaggttttaataataatggaattgaaaatcaaactttgttattttattattataaagcaattagacaattaattcaaccttatttagaattattagatcctgatgataaattatttaaagaatgtcaagcagctgcaggtcaaatttgtcaatcaattaaacattatcattcaaaaacttattatggtttttcaaatttaaatattcatcttgtttttattgcaggtataactttagtttactgtctttggttacaaagaaatagagatgatatgagaagaaaattattaggtgatgataaaaaacatacaagaccaacagtttctgaagatttatttagaggtttagatgatttaagagcttgttcaatttccctttatgttatgagtgaacgtacaaaatttgcattaagttttagagatatttttgaagaaattatgaatgcaacagttggtaatttaattttaagatgtggtccagattcatctgaaattttatatagaggtataggtttaccacctgcaattttccgtaaacctttaaaacattttcatattgaatcaaattatattgaaaaatcagatgatgataaattagaggatgaagaaagattgaaaaggaaaggtcatttaactagaagtgcaattccaaaaggtttaagtcatttactgttacatccaccaggtttagaaaatgataataatacaaatactattactagtaataataataaagaatcgaaagttaatgatgaaaaggtaaaagaaaatgaagaagaaaaagaaattaaagaaaaatccgaagatgataatattaataaagataatgttaaatcaattgaaagtgttgatatcaataatagaattttaccaccaccgattaaattaccacttttaccacaacaaaatagaatgacatcatctttaaatagtaaaaatattgataatgatttaaaatcaattacaaataatcattataatttaagtagtatttcattgaagaggaaatattctaaaactgaatctgatagtgattcaatgatttcatcattttctaaacgttcatcacctggaattcataatttatctccaataccttccaaaaatttattatcaactaataatataaataatttaccaactattaatactgaattatctccatcaaatgttagtagttggagatcaccaaattctgtttcaaatatttcatcaaatttgaatcaaaataatacaaagacacccaatactaaaacaacaactacaccatcaacttcatcaaatacaccggattcaaatgtttcattaccatctaatatatcagattttagaacacaagtgcctgagatgcttgattttttcccatttgttggaggtactaatgcaatgattagtaatatttctacatggactgaacaaagtggtcaacaaattccacaaactggtcttacaaaaatcaataataatgatgataatactaacaatactattaataataatttcaataataataacactcctactaccaataataacaataattttaattacaattacaatgattataacatcaataattttgtaccaattatgaaaacaaacaatggtattaatactttaaacactaccactaacaatttatttcaacaggcaaacactagtaataatataaactatggtattggtatgaatatgagtaatatgaatatgggtattaccggtatgagtattaatggtttaaatatgggtaatcaattattaaattcaaataataatattaataataacaccaataataataataataataatattaataatactaataatatgaatagtataaattctaataatttaaataccaatacgatgaattattctaattattatggatcattaagttctaattcaagtttaagttcaactaaaaaaaatccaccaatcaataatcaaatcaatggttcaccatcaacatttaatcaacaaaagcaaagaacacagcaagaacaaccctctcaaagacagcaatcagtatcatcacaaaagtatagtagtatatcaacacaacaacaacaaaatcagaatccaggacttatgtctgagacatttgatagtattttcgatgttgtcggtagtgaagatttttggagtttaaacaatgatttaggatttataccctaaacaaatgaaacactttatttttttataaacaattaaataaattactttataaaataggaattaaatattaaattccccacatttttcaacaactttccattcaacattattaatcatacaagtatcataaatgtttaaatttttaccaattttcaataattgttcataatgtggtaaataatcaataaatttaccaaattctattaaattttcatctttataacaacgtaaaacaccaacattatcaacaatttcattagaaattatatctttcctccaaaaaataccttgaatccaagaatttaataaaataattctacctatatcaatatttgaaactgtatctaaaacaatacaattattatcaattaatttattaccaatgaatttacattggggacctaatgttgaatcaacagtaatccatttctcttgatatttttccaattgattagtcaatggattaatcattttaccagtttctaatctaatacctgcattacgttcattttcatcaattggatcactgaaatgtccaatatctgattcaattttaaaattttcagtattaccattatgcattaaataatgagtaattaattttgaatcaagaaattcatgattaaattcaataattgttgatgaatgttcaatttcataacctgcaaagaaccaatcgaattgatttgaaaaattttgtatatttttcagtttcctaatatcaacgtatttacccaatggggaagttattacgattgttgaagttgattcagattcttgtggttcagtttctaaccattgaattgaatgtcttattgataaactcattgcatgcaagataaaacatgaacggatcacttgaatttaggaattattttttgaggtatttattttttttccatcaattaccggaatcattagtattttcgaaaatttagacatgtttataactatagtttataaaaaaataataaaaggtacatttacaatatatactatacaattgtatgattatgaccaggatcattaattgtattaccatcttcatcaattgtacaatatttaatatctaagaaccattcatcatttaaaatttctttcattgtagctctatttttaatatcaattgttaacattttactaattattggtcttgatgcatgtggtaaaagtctcattaatctataaggaccatgtatttgcttttgacttttagttgcagtaactgtacgacgttcaggtaattcagattgtccatcagttggacaggtattggtattcgcattattattaacagattgttgttgttgttgttgttgttgttgttgtgtaggcggaggcgtggaatcatgatgatgatgatgatggtgaacatgttgatgaacatgttcatctttcggcgttgtgatagttaatggtttatcatcattttgttcagatccagattctgtaactggtttaggtaattcctgttgaataggttgttgttttgatggcgatacttcttgattaagaattttaggtgttgttgccatttgatttggatcacctaataattttttatctaaaaattgatctcgtttgttatctattattggatcatttttattatcattgattgataaatcattaattttttcaactgtttcattaatttgattttccttttcctttaattctctatccctttgttctttttccttttgtaattgaataatttttttctttctttcaattaataattctttatgtttttgagcactttcaacataatcatgaggttgatcatctttcatacaataaagactaaaacttggatcatcatcctttggagctttccaaggaaatcttcttaatgtcatacaacaataaataattgcaattgaccaaatatcaacaaattgtggatcataattatcagctgaagttaaaacttctggggctaaataaggatctgaaccaacaattccatgagctaaaacaatatcatcttcaaatggatatttgaaaacaactgctgaaccaaaatcaattaatttaacaataccatcctttgtaacaacacaattatctaattttaaatctctatgagataatccaacagaatgtaaataacttacacctaaagtaatttgtttaaaacaacaattaatttcagatctagtcatttgacctgacataacaactgcaaagaaatcaattggtgcatattccataacttcaaagaaatgattattttcatttataatatctaaagtttgaataatatttggatgatgtaaagttgaaccaatacaaaattcagcagtacattttttagcatattctttaactgattcatttggtcttctagcaacaaattctttaacagcaaatgtaacaccatcactttctctaacaattaatctaactgaaccacctgcacctgaacctaaaactttacctaatttaccatattttttagtaactgaaccttctaaatcatcccaaaatttttgatcagttttaacaatcatattattatttgcatcatgagtgaaagttggagttgaaggagttgaaggagtttgatctctttcctttaaatggaaataacctgaagaattagtttgttttaaattagaaattgaatttgagattgaacttgataaaagattagaatttgattgatgattattatgtcttttattattattagaagaagaaaaactatctaaatgattattattattattagtagaagatccattatgatttaatattggactattattattactagaattcgattgagaatttttacgtgcaggtctaaagaattttttcaattgaaccattgaacttgaaccatttctatgaattgggggtggtgatgaataatttgaattattattactataatttgagttattattattattattaatatcatttttagaactatatgaatctttatgatgatgatgatgatgatgagtatcatcagacattattgatatttgtgattcatttgaagatgatctacctaaacttaaaccgaaaaatgatctccgggatgaaagatgatgagtaccgggggaatttgatgaattattattattattattattaatagatggaatattaatatttgaagaagaatgtccatgtccatggaaatgatcattattgggcacaggagattcaaaactactttgactattctccctgtgttccctatgagctaaacctgcaaatcctagacgtggcatagtgaattattttatttgagtataattttatgaatataatttctaaattggataagttaagttaaaatagttaaaatagataaaagcagcagttaactagcctacatgcaacagagacagacacagacctgaacagagaccaaccccaaaagaaggacacagctattaaaatacctataaatattcaatcatcagatcctctcactcttcgcctcttaataacccgctcccgcgtacttttttattacttttactttttactatgacatctcttttgttgtgtttgattacatgttttttatacagatttataaatcatacttattcttacaatggaacactcttatcagctggatctctaccgtaccagatataccatccttcatacttatgacgcaatggaacatccctagcatctaattccctaatatcaactcccccctgttgtggttgttgaattatcctcttcactttaattgctgatttaacatcataatattgaagtccaaaacataatttacgtgaaactactggtaatacttcaacaagtttcccatatttaccaaaatcttccttgatttcatcaatttcaaattcttcactataattaatacccgcatcaggatatccattcctttttcttatgctattagtgttattattattcatgttgttgttgttgttgttatttatattgttgttaactgttttattattagtgttattaaatttactggttcgtctcttatcatttaatggcttcttaaatactaataccctacgtgctttctcttctcccttcataagtttagaaatatatttatcactatattcacttacattggcactttcattatcttcatattcatattgatcttcattacattcatcattattatcaacattacttacatcattaccactttcatccatttcaggaatccaaacagtctttaaatgaacatcattaactttgaaaagtcccgtcttggaataaatataaaatttctctgcatcttcaaattcattaaaatgtaaaaaaattgaaacttcttcccaattaatactttgattcagttcatataatttatcatcctcataatattgataattatccttacgtacaagttcaatccttcttaatggtcctccatataattgactaagtaatgttgatatactcatctttttcggtatattagtaatagcaattatcttaaaatgtggtttattaatattaacttcttcaatattcttaaatctgctattgttaccattattactaacattcattataccttcattcttttgtaatgctttattaacggtattagtattattataagaattacgtttcttttccccttcattaccaccaccacctacacaaacattataattatgactataattataactataatttaatggatcatatccatatgtttgcttagtttcatattcttgttcagaattgaataataatgttttagcaagtttacgtagactatatctatcctcttttacaaaatttgatgcattactaaatgttttgtgttcattattattattattattattatcaataacattgtcattaaaaccattattaatagacttttgccatctttcattattagattgtcttgatccaaccctttcttcattaatatcttgcattttttactataggttttaattacttttatttatgaaggtattttattctttgattaatgagcaatgtctttagtatattgtattttatgtgatagggaagtagtgaagtagtgttatatataaatatcaccaatatactaattgtaatacccttacaaagtttaaaagaaaagttctataataaaaaagtaatcattataaataggtatagagtaaataataataataataataataatagcagattatccccttttatttttcaatctttttcattcctgttttaagttaacaacacctccaaatcttgatgtatcaccttcaagtaactctcttaatgccatagtggcatatgtagatacccctaattgcatctttaaaataaccgcagtctttgatccaccttcaattccatctaatatttgctttacttcttcatcacttttaccttgacttttattaaattcctttaattttaatatttctaaatcagttttaactaattgatctgtaacttgattatatttacggaaataatattctaaatgattaattttagcaattaaatttctatatgatccacttaatgaaaattctctaactttacgtgtcatattaaatggatctaaattatctttcttcataatttcaacataaacttctcttaatttttcattagttggataaataacatcaaatccctggtgtcggtaaaacaacatcataaatattaaatttcttagattcaatctcttccttagtaattggtcttgctcttaatcccggtaattctttaatatcttgaataatttcatcatcatcttcattatcaattatctttttatttaattcttcattatattcattagaattcttttcattattacataaaactaaatcaccttcaacaacttctaatccaaataattgaattctctttgatgcaactaaattccaaatatatgattgatatgaatgtccatacataattcttaaatttctaggtatacccataattgcattaaaatatgcattatcactaaattcaccagttttagaatctttctctgatttttcaagtctacttaaaattgaatattctgcattacatttccttggcatctttttaattgctaattttgcatccttagtttctttccaaattttcctagattcaattgatccaggtataacaattttttgttcacttaaaattaattcacctgcatttttccaattaccttgtaaaatttctttaccaatttcatgtgttgaaatagagaatgtaccaaatctttgcataccataataattaataaatccaacatcctttaatgaatttaaaattggtgtaattgcttcttcaatacttaattttggatcaacactttcaacatctttaattgtaataataaattcattaccctttaaatcacctaattttaattgcattatcatcatatttaaaacaacctaatttacaaccttttaatgctttatttaattgtgtaactctttcaactgaaaacctttcaattgacattctttgaactgtaacacctcttctatcctttgtacctgcatatttaatattcttaatttgagttttcaaaaatttagataaaatacttgcaacttccattgtttccttattctccttataaagtgaaaaatgtaagaaatttttaatttcacctaaattatgttcaatattgtttgtaactttagtattctttctcttacgacctttatttgcattaaatccaaatataaatgtattattagtagtagtgacagattcaactttaccattgaaaacttctctaattaattgatgaatctttgttctaattgctttatcttcaaattttttactaatttcaacagttttcttattatcttttaataagctaacaatttcagtgacttcatcatcactgaaaaattctttcaatttttccttttcctcttcttcaatatctaatgtaatttctctttcctttaatttacgttcttgttcagctaaaattgctttttcctcatcagttaattcttttggcttaaatccaacatcagttaaatgaacaacatttccatcaacatcaatttcattaactaagaaatcagtgtatctttgttttaatgtacctctaattctaacatcggaattggcatgacatatgaattcagttataccaacatcaacttcagttacaccacctaatgaatcattatctgatgtagattgtggttgtgattgttcgattttagcctttttggtagattcttcaactggttcttcaacaagtgatctctttaatgtttcaacctctcctgtactctccatattgactatattccttatcaacaaaagacataaaacctcttttcaagataataaatataaatttaaaataaaataaaaaaattttgaaagtgaaaaatttatcatgaaaatggaaatggaaaaataaacgcgttcactttgaagtttctctacctgcagttgccagttccttaactctgattccatcttaagggtggtatagatacctgtttgagttaggttattagttgctaaagttgggcaacgggaaatgattgtcagtggggaatatttgagaaagaaaactagcataccattggaagatataaagaataagataattaataatacaaatacaaaaattaataaattcatcatggattgataatttagagaagatggttgaaccaattacacaacctacccaacctagtaattataatcctgcaaaggatacactgagtaatgaattagttgaacagggtgtactttgtagattaatcggacgtacatatgagaaatcatttcatattgatgttaaatattcacagggtaagaaaattatagatgataataataatactactaaacaagaatggttatttggtagaaataatcatacatgtacatatttattacctgtacaaagtacacgaataagtaataaacatttcaaattatggatgaatataagtaaaaataatgaagagaatgataataatttaatgattcaagatttatcaactaatggtacatggttaaataattctaaattaatatctaaacaaaattatatattgacacaaggagatgaaattgcaattggtattggaattgagaaagatgttgttagatttgttgttcatttccctaatccaataattaatcaaatgttacaaaggaatgaattaaaatatgagacgggtattaataaagattttataattcgtgatgaaattgttggttcaggtgcatttgcaacagttaagaaagcaattgaaagatcatcaggtataacatttgcagcaaaaattatttcaaagaagaaagcattaggtggattagatggtgttgcaagggaattacaaattttgaaaaaattaaatcatccaggaattgttaaattaaaggcattttatgaagatgatgataagttattatttagttatggaatttatatcaggtggtgatttaatggattttgttgcattaaatggtgcaattgatgaaagtgcaagtaaagaaattgctaaacaaattttaaaagcaattttttatgttcattcaaaaggtatttcacatagagatttaaaacctgataatataatgattgcacaggatgatccagttattgttaaaataactgattttggattagctaaaagtcaagaaaatgagagtagaatgaaaactttttgtggtacattagcatatttagcacctgaagttataacaaataagaaaaaaatttctaataataataggaaaagatatttaggtaatggtaaaataactgaagatttatattctaataaagttgatatttggtcaattggatgtcttttatttgttataatgacagctcatttaccatttagtggatcaacacaagatgtattatttaaacatataattaatggtgattatcatgaaaaattattagaatcaatgaatatttcaattgaaggtagagattttataagtagattattagaagttgatgttacattaagatttgatgcattacaagcattaaatcatccatggtttaatgatttagatgatgaatcatcatcacaagttagtttatcacaacatttatcacaatctcaaagacctaaaatgaaatctatatcacaaaaaaataataattttattaataataataataattttaataaaccaggttttaaaatacctgaaatacccaaggaaaaaattgataataatatttcaacaagtcaaattgatagtcctgatagaaatttttctaatattaatgcatcatcaacaccaattaaaccaatattatcaacaaatttaacattagataaattatccctagatttaccatttaatccaatacctaaaggtacattaatgtccttaactttaacatcaactaaaacaactaaagaaatgattgataaaatttacataccacagggatcatcatcatttattattggtagattacccaatgttaatattgtcattaatgatgatagaatatctaaaattcattgtattatccttaagagaagacatgtatctgatgatattaatgtatcaacaattgagaattctacattaagtattaatgaatcaaataatgatggtgatagggataagattgttttggatgatttatggttattagatttcagtactaatacatgttatattaataataagaaaataggtaagggtaaaaaagttaagatttccaataatgatatagtttcatttttcgtggataagaagaataatattcgattggattataaagtgaaaattattgataatactggattatttattgataataatggtgattgccaatgtattggaattgatgagaatgataagaaattatttgatggtaaattaagggaaggattgaaaatggctgaagctaaaatggctaagaaacgtaaaaatgatacacctattgaagtatcaaataaaagagtgaaatagatatattagatagaaacactttgtaaattaagaaatatgtacaattaaaaataaaaactagagataatgtttatcattaattgtattaaagttatataactatagataataaaaataatgatagaaataatgatagaaataaatgtaagaaaaccccaaccccagaaccagttcttttttttgaattttttaaattattttatgttattttactttttttttaattaattaatatcaatggggaaatgtaaaagaaaaaaaatgtagtatatgataatcgtacaatcaaactcaacgaatgaaaattaataaatgcataaaagatttattatagattaaatagcaggagctaaaccaacagcatctttacctaaatcataaattgaataatattttcttaagaaagcatcaccaataattgctaatggaccaattggatcagggaaatccattggagtgaaagcagaaatacaactacctgaaacttctaaagtataatcataaggagtaattgtaaaattataaccatcaaaagtgaatgttaaatcaggtaaattatctcttgaattacaatcaacagtatattgaccattccaagatttttctgcaccaatttgagcatttaaaatttcagctaattgagaaggtaaagcaattaatgaagtaccagtatcaattgctgcaccatgaccttctaattcagcatattcatcacctaaaccaataccatcaaatttaacttcccaataagcttttcttctaattggtaaccaagtaatatcaccattaaatttagatttatcataaccacctaatgaacaaacaccaccatcttcacctgctttagcggaatcacctaaataaaaggcaaattgtggtgcatctaataaacctttactaattgcattataaattggtggaacaactttatcaactgaaattgtatcataagctaaacctaagataccatcgaatttaccgaaagcgaatgctaaacctggttcacttgttgcttcagcaaaatcttgttcaggtataactaaatcaccaaaagttaataaatcttgagaaatgaaaccttccaatgaacctgaaccatatctaattgcaaaatcggtaccattttgtttataagttgaagaagaatcatgatcatatttagcatgtaaataacaagctaaagaagtacattcagtacttggaacccataaattagatgaaccagtatcaaggataactttaaaagtttgaccaggagtacctaattgaatttcagtaaaatattgagcattcatataattagttaaaggtaaatcatgagatgaagatgaggattcaataattgaattttcaacaaatggaacaaatggtgcattataatttttaacaaaattagagatatatttacccttaattgaatcaacataatctaaataggagatatctttaaaatttgattcaaatgaatgtttcttaattttagcattatgaacttttgcctcagcagagccattgaaagaggctaataaaagaaccattgaggtaagaattgagtttgagaagtacattttttaaatttgttacctatacagtgttaattgatgatagttatctgtactaggagagtgtgcaaagggaaagttataaagaaagttaaaaagaaaagcaggatacaaaaagatggcaatagataagagctaattaattaactaaaattaaaattaaaaaaaggatgagccagccttcttttcttgagggcaaattatttttattttattttattatggctttattattattattatatttcctatcggtgattatgtaatcgtgtcacgtgactgtcacgtgatcatatattatattattacgtaatcctttatttattattattattatctatacttgccatataatcatctataaggaaatccattggtgataatggtgtaaattcacttaatttacgtatatgtttaggtgataatgtagatttaacactggaactcatctcaattggatctgtacttttcgtatagtatggatttatattgatattgctatttcttctattattattattattattattattattattattattattattattattaactatattcattggatcattatcatttttattactattattatcattataaactaaatctttaacatcaatatttggtgaaattaactttattttaccacttttactaatcctatattgcttttcatttatttgataatcataattaaaatattgtattattaacattgaatcaaatataactgtacccattgcaccaataaaataactaatttcattattccaaaaatttaaactattttcaccaccttttatggaattttcacaaattaataatgaaattgaataaaataaattaccaaataatgcaaatattataagttttaatgaaattccacttgtacttttaatcttataattggtgtatatttgtggtattcttgaaactaaataaagaaatgtacatatccatgcaagtaatttaccaaattgttccttattcatagaaatgaaaaatattattatcatataaagtattgaattattatttttatcccctgtattattatcccccatattattatctcctataataggcaccccctgaactttagaaatacttgatattaatgcaactgatacaatcttcttcaacccattggatgatgatgatatcgacattttcctctccctattactcccattccctttaccactactatttctaaatatcccttttactcgtatctttggtgatgttttatattttggtgaatttaataattcatttctaattgtaccatcaatagatccaaaagtctctaaattatcccttaaactacttcttggactattaatatacttatccctaccatgtctatgtttattcttttgtttaggatgataccatctactttcaggattattatacattttggtataataataatattgaaatcctaaaataatatcaataatacaataataactactaagtaaaatttgaaacatcattgcattatttaataaacaactaattaaattaagtaaatcaccaccaaaccaacaaattaaaaataaaagtgaaaatccttcaattgatttatctgtaaaattcttaataacttgtggtaattgtgcaaaaagccaaaatgatattgacatatatccacttaaattagataatgaatctagtgttttgatagtatttgatgaaagttgaagattttgaaaaaattttgatatccattctgctaatgtatttgatattgatatcgatgatatcgatgatattattcccataccaccatcttctcctaataccatactctcctaatacaataccttatcataagaaacaacaaacaaaaccttcataaaaactatataaaatcaacatgttatataaaatcattgataaaaaaagcttctctcgcagattccttcccttccctttcgtttcgtttctttttattaatgttaccgaaaatttatacaaaattatatacatacatactatatactatacaatattaatatcaggataaacttccttagcgtatttgacaaatttgttaacatttaaatctgaaaatattggcccccaacatacaagtaatccctttgctctattaagtgaaattgtacgaaatacacgtacataattttcatttggataataatttcgtgtcaatttttgaatataatataaatcagaattcttaggtaagaaaagacatatattctccgtatatttacgaagttgaagtattaaaatttccaatgaaaatggtaatagattattaagatcatatgtttcaacattaatatattcaggtccaccccatggtggtgatccaaatatacaatcaatcttaacatcttccatttgctctaaactatttttagattcttccttattcgcatataaccttctaacattatgtatttcagtatcaatattatatccatcaccaagatcatcatcaacattatccatatgatcatccccaacaactttacattcatcagtttctgtaatataatacatccaattcaatgggagtaattttaaattattcttcttactttcaccaaaatatacttgtgcattatgttttgtacaaaataaatgaatatgattaatatcaactgcaaaaacttcatcaaaatattttaaaaattgtataacattacctccaccacctgcaaatgcatcaactacacgtgttggtctatcatctatctctccaatacaatatttaattaataatgcagtaaatttacttattgattcaggtgtaacactaaaccataattcctttgttaatattataccttcatcatattttttgaaaagtctatgtctttgtttccaatatttaagcataactccatcaaattgttcctgtttcataaatatcttgttcatattctcattggaatatttattattataaatgacaaaatctttctttaccttatctttgtccttatctttatcaatacttatatttgtttcattatcattatttatttgtactggctcattagatattggtgctatatccgtacttccatcttgaacatctaaacccataccaaacaattgtaccaaaacaagtaagtaaataaacaacaatctgagccaattgtgttacaatttcgaatctcattttggtaacatgtttttttttcaccactggctcaaaaaggaaacttattatagctttttcttctttctttcttttctttctttcttttctttctttcttctatttctctatcaataatgtcaggatacactagaggccatatctgtggtgttgataattgtccttctagactttggaaaagagttgatggtagaaatgtttgtcaatatggtcatattaatgaacatgatattgaaataaatgatgatgatgaaatgatggcaggtggaggaggtaatggtggatcatcaataccaggtgttggagattttagtagaagattaggtaatgttgccggattaactacaagtcaagcagtattaaataaagttcaacaattatcatcagagaaaaattcaagtagaaaatatggtgaagattttaaaaaattacaagcaagatgttatcaaattatacttgctaaaaatacaaaatttattataaataaattaaatttaagtcccattcaagaagaatgttatattaaaattgtaatgactatatggtgtaaaatattaaatgcatcaatcaatcgacgattagatacaaaacataaatatgttgatattagttatttacaaataatcaattatttagcaataattcaaatgaatataccaatgtatttatctgattatattaatttaacttataataatggctttaatttagaaagaactgaatattgtttacctaaaagacttagaattcaaatcccaatatctcaattaagttcatttcatggtcatttaaatttaaattattttaataaattaaattcaagatttattactacatatatgaaaaaatttattaaggaaactgaaattaattattatccatttcttttaagaactatattaaatttatttttacctattgaaatttgcaaaatgtacaagaattgtgttgattttttcaaaattaaatttacatttaatgaaatgatgataacacatatacatcctgaattgaaaatgcttgcattattgataataattactaaaatatatttttcacagaaggtaaatagtaacaatttgacaaattggtatcataaatatcttaaatataaaaacagtaatgaacttttcacattaaatagtagttttattaatatgaaaaaagtaatatattatgaatcaacattcgaacatatttacaattgggatcaatcatttgttgatgaatttatacaattttatgaaactagtatattacctaacatcagtgttttcaatattgcttcaagtaatgaatattcagataggaataaattaaaaattgccaaatctattaaagatttattcaaatcttcaattgatccacaaagagatgatgttgaagttattgaacaaaatcaaagtgaatacatggaatttctcattaaagtatataatgatactgatgttactaataaaactacagaaattgaagaaattgatattactaaaattgattcagttttaggtgaacatatattatgtcttttacaatgtaatcaaatgcaattatctggatcaattaaacaattaaccaaacaattaagccatattcaacaataaagatacttttctaaagaacaataaaaacacaatttatatacaaaatttatagactattataaatacttcattggatccttaggagctggatcatttttcaatgataataaaactttatcccttaatctaaacattggttgtaaaacccaagtattataatgaagtacatttgtttgttcctttggatctctaataatattaaataaatatggtgattctaatttacccttaccttcattaacttcgggttcccaccaaagatgtaatttccaatctctccatttaattgcacgtaaatcatccttaataaaaaataaaaatccttccctttcagattttttattaattggatcttttaaaaattttaattgacttataccatcaattggtctatcatttggaattttaccattaattacatcaataaatgttgaaaaaatatcagttacatgaatcatttcatttgtacgtatattttcaggtataatttttggccatcttgcaataaatggaactcttaaactaccttccattgcagtatgataagtaccattataaaaacctgctgaacctctataaggttctctgaattcaggtccattatcacttgcgaatattaaaaatgtattatctttaatacctaattcatcaatatgttttaataattgaccaacacgatgatccatttcaaccattgaatctgcaaaattcccatttttagtaataccttcaaaatctctatgtggtaaagttgggaaatgtaaatgaattagggggtgatataagaaaaaagattgtttgtcgtttgtcattctattcataaaatcaatacttttattaacaacattttcatcaattaatcttctttgatctaaatcataaatacaaacatttttagattcttcaccctttttaccttccattatataaggtaattcagcaatacttggatcaaatccaacactttcagtaaattgtgattcatcagttgttcttggaattccataccattcatcaaatcctctatcagttggatatctaccaggtacatcacctaaatgccatttaccaaaatgagcagatttataaccattctctgctaaaatttcaggtaataatttttcccaaggttgtaaaccttgtgggaaacctggtggaactgtttgtttacaaccagttctaaatggatgacgaccactcattagtgctgatctagttggaacacaatcactttcaacattaaaatttgtacataaaacaccttcagttgctaaattatcaatatttggagttggtgcacctcttaaaacaccaccaccataacaacctaattctccgaaacctaaattatctgcaagaattaaaataatatttggctttgctggatctaatgacattattgattagtttagtgatcagaaaaaagaacaaaatgatgttttctgataatcattgacattccaaaccataatcattatatatatcaaatataaatcatactttcaaattacttatcagtgattcaattgattgaaaactggaaaatttaatctaagggccgagaaaattatatcgaccgagatgccatagttttataattttgtttgaaaagatggttatttcttaatatggtaattttttcagtattacatttcgaaaaatttgaaatattctaaatccaatggttgataatcaaacagattatttagttgattttcatttgataaatttaaatctttcctaaaatcacaatcaatttgtaatttaacccttttattaccttcggaagtatcaagaaattcacgtaatttaacaattaattcaaaaacttcctgtgatgaaattggccaatataatttaaaatttttaagtaatcttataacttcatcaacccaaataattctcaaatcaacattttgttgatctttctgtaaatcaaactcacaaaatttgtaaatttcatttggtaataaactaaaatcataccttttattcctttgattataaatatcacgtagtaaaataaatatgaattggaaaggatttgcatttctcatattccatttaaatttactagttgatttgaaaattgttaatctgattctagtttcatataataaaattaatacaacttcaattaggtcagaatcgtatagtttatccattgacagtaatgttatgaatgattgactatctttataatttttatttgtatgacctatattgatattaatcttatttggtggagtttgtgatgatcttctacttatattattaagacagtatttgtataaaatgaaaattcttaaattcagtattctcgtattggcaattaaccatctattagttgatgaatcataaatggtattattctcagacaatttcattatattattgccccattgataagttttttcatacattgctaacatctctaatttaaacaattgaaaatcaaaattttggaaataattagtatctgaatcaacactcatataagtaaacaatttacttaattgagaattaagatcatacatcatattattataagagatgaaaacatttaaattatttgaattttcaaaatttgaatcaataaattcatttggtttgggtatattaacaatttttgaaaaatgatcagctgtattgaaagtattcatccaaattgatgataaaatatccattctattagttaaattccaaattaatcgtttatgctgaacatttatgaaaaatggattattattatcaatatcatcctttaaattaataccaattgataataaaattctaattaatgttgcaactttaacatttatatttctataattaaaagatgcaacttcaaatataattaatgatgattgaattgcttcaattgatggaatttgtgggaaatttatataatttaataatttttcatagaattcataatattgtctctgttcatcaatacataattgaatatggttttcatcatttgatttaaaagattcttgaataagtgaacaaataaaaattgatagtaaaataagtaaaaaaggtacatccaatgaattgataattgattcatcaattttatcattagcgtttatatcaagtaaaatcaatagtttttcctctatggttgatttatgtaatacagggataaatgaatgaatagaatcccaatagatattaaaataatacataatttttttatttttaggaaatttagataatatttcaattaatattgttaaatcattatcattatttaaacctaataaaatatcatttatatttggattaaatgaattatgaattgaattatcaacaaataaatttttaattgaagtaccaagatatgaaaataatgcatttgaagtatataagactaaatttttattattttgttgttttaaagtatcaatattagtagtagtttgattattattatcacttctgttattaacagatttttggaaattataaatgcaaatagatttatttaatttggaacaattagaacatgggaatccatgatcacattttaccttatgttcatagcaatatttacagctactaatcaatctattcctttttatcttaggcatagtttaggcatatatatataattacaaaagaaaagaatatttaaactatgttatctaatcagagtcttgaaaagaactcttgacccatcaacactgatgtatagcatagtagaaattcacgtgacagagcactgtggctgataagagaagtaccttatcacaatatcacaatatcatggtttatcgaccgatatatagctatcacccgaatacttgacatttaacggttgtttagttattttttcacttatcttttacctgcaaacacacaacttttcaatataatatacatttgattctttaaatcattcaaggacttaccctggagataaatgtatactgtggagtttaagtttttttgaatgatacataaataaacgtcaaccccccaattattttggaaccaaatatcaacttgatgttaatataataaaaaactttttcttcaaatcaatttattatatattattattaccatcatgactaaggaaattaacttagaggtaaattgtacacatacaaatgcaacttcatcaacaagtatctcatcaaatcaatctcaaaaaatccaatattggtcagataaagaggaacgtaaacttgtatggaaattagatttaacaattgttttatttttaatgttttcattctttacattacaattagatagaagtaatatttcaaatgcaataactgataatcttaccaaagatattggtattacaacagatcaagctagaaatggtaatcaaattcaaattgctgcaattgttgttatggaaataccttcaaatattataattcaaaaatttggttcttttaattggttaattttacaaacaattttatgggggttagttgcaattttccaatgttttattcaaaataagaatagttattttgcaacaagatggttattaggtatgtttgaagcaggttttattcctggttcaatttattatatttcaagattttataaacgtaaagaaatgtccaaaagaacaattttattttattttggtaattattttggtgccgctgttggtagtttgatagctgctggtattttaaaaattaataatagaaatggttggtcctcttggagatatttatttcttattgaaggttgcataactatttttggtacaattttattagcaacttttgttccaaaatcaattgaaaatccagttccgttacatggtaaatggaaatatttctcagatagagaagttagtattataagtgatagattagcattggctgataataataatgttgaaaaagatactgttccaattactttttcaaatatcattcaatcaatttttcattggagaaattggttacattgtattttaaattttattacaattgttccatatggtggattacaattttttacaccgaaaattgttaaatcattaggtttccataagacaaaggcaaatgctttagcttcaattggtagttttggattatgtgttttatcattatttttctcaatcttatctgatcattttggtaaaaagggtatttttatttttattgcttgttgttattcaattatattttcaggtgtacttaaatcaatggaaattggtcatactaaaaaatggacaatgtttgcaattattacattagttaattcaggtgctggtacaactcaagcattaaataattcttggatttcagttaatagtaaaaattatatggatagatgtgttggtttagcaatggcagttatgggtgcaaatttaggtggtattacaggtcaatcattatttaaagataaagatgcaccaacttataaacctgcctttttagcaattctttgtatgtatgcaggttctattgtttgggttttgttggttatgggtatttattattatttaaataagagaggtactacaaatttacctgatgattctaaattagaaaaacaagaggttaatgaatcttcactaaaatggaaatatcaattatgaccatataaatctaggttgctttttttctttattctctcactttataatagtaatgctattttacatatcgataacactttctataattattcgattatgataaacatctcttatctatacaattaccgaattaggcaactcctgccgttcatgtaagattttggaggatttttgctgggcattctatcaagtagattaattaattaagtaatatattcatctgtgaataaacaaccgggaaacttgttaaacaagttaccaagacaaacatataaatatagattaaacccgcagtttcccacacggtactcaaagcctaatttacaaatactttctttcttcaaaacaccaaccaaaatgattcctgaaaagtatgtacactctcaaataactatcaaataaaaaagaaaatactaacatataacagaggtactaaaacccaccctttaaaaacagaagaaaaagctaaaattccagatattgggttagatactttccgatcaactggtgaagagttttacaattcagttaaagcagcattggagaatggttacactcttattgatacttctagtatttatggtaatgaagaggcggttggtagagcaattaaggattatcttaaggaataaggtacttcaagagataaattatttattacaaacttaattatggtgtgctgattgtaaaaaacctgaaaaagctttaagaaaatcagtaaataaattagatttagaatatgttgatttatatttaactcattggccaattggtattcctaatggtggtagtttattaccaatgaatgataaaggtaaaataattgctataccatatgatgaatggaattatattgatacttataaatgtatggaaaaattagttgaattaggattaactaaatcaattggactctctaatttcaatgtaccaaaaataaagaatattttaaataataaagaaattaaaattaaaccagtttgtaatcaagttgaaatgcatccaagtttaccacaaattgaattaaaagattgatatttcacctgcttgtcttgcaatttcttaagctgttgcaagaaatactgttgttataccaaaatctatcaattaacagagaattattcataatattaaaatctttgaattagatgaaaatactgttaaagaaatagaatcaattggtattgaaaatcctcacagacttcctaatccaccttgggatgtcaaaattaatgttttcgaagattcagaagttttttaaagttaattggaaaagtttgtatatttatatttttgataaaaaattatctaattgatcattctttacagttatattatcaattaaattttgataaaattccataccattatttaaattatttaaacattcattaaatccttcaaatgtagattttaaaactttaatagattctaatcgtttatttgatattttaacattttctttacatctattgaaatctttgaatacgttttcaaattgttgatatttttcaatcttatcttcattgaactgagtaactgtatccacatctttggtaaatttgaaaattaaattcttcaatagttcatctaaatctatgtccctattatttctataattttcaaaaatataacacttcttagccttatcgtttactttaataattgtattatcaacgtttttcttaaattgtttcaatgattctataatgtttattaaatgttcatatttctccttaaatttaggattaatctccaaaacattagatgaaggtaagtactcctttaatgaatcttcagaattataaatttccaaaaatggttttaattcattaacttgagtatttattaattcatcaccatcttcactctgttttatataattttcataaattttaaatgaattaatcaacattgaaccaactggatctttttcaatttttttcatatcatgttcatttattttagtccaggtattatctaaacttaaacgacattttgattttaaattagttaaattttgatgtaattcattaattatttcaattccaccattttgtaaaatatgtgatttttgttcaacaataatgggtggtatttgatcatcattaattaaatcttgaatgattttttcattctttaataatttatgaatttcaattgatatttcttctaatggtgatattaattgttcatttatgaaattttcaaattgtttagaacaatcaattaattgtgttactatagtatatggaatcaatgaatcaaatatagtttcatcatttaaatgattaggtattagagatttaaccaatataacacgtggtaattcaggaagtgtattaaatggtttaactaatgcatttgtgtccatttccatttcaatattcaatttcaatttcaaactttcaaaatcttgtataattttagtaaattttgtataattttcataattacattgatttattatatcccttgattctaaaatatacatttgaccaattgatttattatttttattaaaattaatattagcaaataaaatatatgagaataatttaaaataagtaaacttgaggtaattataatcattatcaatacaatcattataataatctgaaatttgcattgatattttaattaatattgaatttttaaaattatcaaattgtgcctgtaataagtaaatttcctgtgattgagccaacattaatttcattaaatacgtgtatgtatcatttaacatggacaaacaaccaatacaatattgtgaataaataccggattttttataatcttcattacgtagttcaataattgtaagtattgaataatatgaacctaattgataaattgatgaattaatttcaaattgtaatgaattatcaattttatcatcccattggaaattaataacatcaatgggtagtttatcattatttaatgagtttaataatgatatatattttttcaatttgatgataattgataaattaattgtccaaatgtcattcatatctataaacaattcatttcttaaatcattcaataattgaattgtctgtaaataaggtttaatatcttgatttaattcgatttcaaaaattcttttgaaaacattaactaaatctacctttactgtcctcaatggacgtaaatacatcataccagattcatcatcatagatctccatacctacaggaaaagaaaatagagttattcaatttgtaaacatcacgaaattttcaacttgtaattattaacttttcgtgtacccacacactaacttcactcttttactaatgaacaatgataacgggtttagatttgctacgtaatcaaccaatacattgcagtactggtatagaaaaacttgatagtgatggatttgatgaaggtatttatgatattagtggtagtataggatatggtagtattggagtttatgagattataattgaattaatgataagcaagttaggaaatggtggtaaggtattatttattgaaagttataataagttcccatggtttaaattagagatgaataaaaggtacgataaaatgttttcaaatatggttgattgtattagtattgataatttaatggaattaattatcttaatgaagaataatgataggttattagataattataatatgattataattgattcatttaatttaatgtatgaaggatttattgaagaattaaggggagaaaagagtaaatatgagcaatgtgttcatttattattttatcaaatgaataaattatgtggtaatgggaaaattatgtttactattggaggtatgagttcaataagtcaacgtgtatataaagaggaggaaggagaggaagatgaagaagaaggagaagaatcaagtgaaggggagaatattataaataggtatattaaacaagatatacttgttccaacgatctcattgaataataaattaaatatttattataagagaaggattataatttatagggattggatttatgatgatgaacaattgagtaattgtgaatatatatcatttgaaagagatgttatacgattgaatgagggtaagattaaatgtgtaccacattatataagtataggagaaggtagtagtgtttgtggatttttcttaattagtaaaacatttgaattaattgatattgaaggtggggtggatgttgatgattatgaagtgactgataatgatatggatgttgaaataccagattctcaagaatattaaaattagatattaaaattagatattaaaattagatattaaaattagatattaaaattagataatagaattaaatatatatgagaataacaattatttatgattaaaataggattaaaattaaaattaatttaagataagatagataatgaacaaaacaaaaatagaaaatagaaaataaattataattgaataaacgaatgaaggtatattaattaaaatgattataataaactattcaaatttttcattatcttcattaccttgattataatctaagaaagtccagaaataccaaataccagcagcaattaaagcaccaataattggaccaatccaataaatccagaaataaacagggaatgaacgtttagcaactgctgcacctaaacttctagcaggattaatacctgcaccagtatatttaattgcaattaaatgtcccaagaataatgataaaccaattaaaacaggagcaaaatcattgaaagaagatttttcaacaactgtcattaaaacagtaacacaaagtaaacaagtaacaaaagcttcaatcattaaacctctaccttttgaacaaccaccacctaaagaattagcaaaagtaacaggacctggagccattgcacttgctgcaccacctgctgccatacctgcaattaattgagtaaccatcatacataaacctttaattggatcaacaactttagttaaaacaagtgttaaagtaactgcaggattaaggttaccaccagaaactttagcagttaaagtaataccaatcataacaccaaaaccgaaaccaattgcaataactaaaattttagatgaacttgaagtatcaactgaatcacctgcattaacaacggatgcaatcatataagcaacccaaaggaagataaaagtaccaataaattcacctgaaataacaacaaataaattttttggagaaccttttaatttccaatcgaaattaaaacgtttattagaacttggttcaggagcattggatgaataacctaatttttgttcaggatccataattataattaaagtagggtgttaaaagaaaatgaaagcaaagaaaatgaaatgaaagcaaggaaagcaaaataaaataaaaaataattaaactaaaataaactaaaataaactaaaataaattaaattataaatatatgggcagacacagctacatttatacagccattgcagacaacccaataaacaaacaattgcaactgacatgcaatgcctaagttcaaaagagaaagaacagaaagaacataaaatagggttaaaccctataaaataatttaaaatctcaccttctttttctgcccgctctctcccattgtctctctactcattctctacttattctataactatcctattgtcccaaatcgttcttcctcttctgcatcttatatcagggtttctcttctattataccctagttactactctactctacaaccatctagtaaattgtaattataccaaacatatcctcctatgtaacattgagcatgtcaccagacaccatcaccatcaccatcaccatttcattaaacctgtccttgaaagcaatcatatcttttactcacaaatatactttattatcaccatttttaaactttatgtacatcatactagtcactattgtctttgtttcaactttccttcgttaatacactattaaatttatcactctattgttgtctttttgccgttttgggcttttagttaccgtattcgtatattttggtgagtttctttctaattattttttttattattattattattattttttatctaaactactatacaaattctagactaaaaactgtcaaaatgttttttaacatcatcatcattatcaacaactgcaaatgtgtcatctccatcttccttctcttccttctctatcttatcttctatattattactactactaactggtggtgatccagtccatataattttacccttttcattaaatgaggcattttcatcactaatttcaataattcctttaaattgttcaattattttcttactaatacccatttcatctcttggtatccaaataacttgcattttatcatctaaaaatggacaatcatatctaccaatactctcatcaattgaataatattcctttggtatatacattcttaaatcatgatatgttaaatatttccatggttggaaaaattgaattaatttattaggtttattcaattcagttctatctccttcaattaataatggttcctcaattaatctatcagtatcttccttctcatttaatccattatcccatgaaactgtattactctctccatctaatggtttcatacatgtatttggtaaaactgttaataatttatcatatgctaaattcatttgaacatgtgctaaaactgtaaatcctgtaaaaattgcctctaaaacaatacatccccaactctttgaaactgcaaataatccaattaaacaaatttcacctaaatataatccaacgaatagatggaaaattgctcttggataacttctacccatcatttcaattccaattccattaacataatttaatgtatttaaatatgtaatgaatagaaataaaaatgaaacaaatgtaaataataatataattggtgaaataattgaatatgcaattgaaatagttgctaaaacttcataacctggatataatgtaccccataattgtccaccaattgaattatatctattatatttacttctaactgttttatccatgaatgaaaaaacataaaataatataaatgcaacaatttgaaataatgtaccaccagcaactgagaaaccatttaaaattatatatgaaataaaaaaatttgatgattttggtaaattatttgataataatgataatgcacttgttggttcttcgataatttgtgttacaacagttgaaactgatgaagaaattgtaataactaaaaaggtttgaacaacttgaaatgcaaaatatgattgttgagtaaaatattcaatttgttgatttgtaacacatccagataatttacccattgtacgtataaacattggtaataacatcattaaaactgctaatgcaactgatggtaaaagtgatgtaattaaacctaataaaactttaggtaaatgataaataaatctaagccaatgcattttatttgttaaataagttaaatttgaaataaaaccaacaaatgcaactggaattgcccaaattataattaaaaacacaattaatgcaattgcacctgataatctacctaattgttcccaccaaaacaatctcatatttggccaaaaaatatcacttggttcaacaccaatatgttttggattaaaatgtaatggttgatcatgaacaattacttgataagctaattgtgcataatattgattttcaaattcaactgtaattgtatttaaaggttttaatgaattatttttattattttgtaattcattaatttctttatttaattttggtaaattttcaatacaataatcaatcaaatcatgttttttaccaataaatttagtttctttaattgttggcattttcttttgtggaatatatgaaacaatttcatctttcagattattatcaaattcatcaggattttttctaaattttgaaacacatttaattaaaatactattaagattattttctaaagtttgaattaatgaatctcttttattaacagttttaattaatttacttgaaacttttgcaacccaaatatttttaacaccttcaaataattttttaaattcatgttcatttaaatattgatcaggaacagtttggaaaataacagttcttgaacttaatttagttgccatataaggagttgattgaactaaaattttcaaattaccataaaataataattctctataaattgagaaaataattgcaccaaaataaatccaagaaacgaaaacatgagcataatatctaccaacattattacaatttgaaatagataattgatttaaacctgtttcaccattaccaccagtagcattaacagggaaaagtataatccaaatgaaaataccaccaaatccaaatgatgaaattaataaaaggtatcttaaaaatagataaccatcaataccagtatatttaataattaaatgaggacattgccataaatcatataatgccctaaaccaatcaattggagaaggtggtaatttaggtggttgatcttcctctggtaataaatctggacaagttttaggttcatagacacgtttaaaacgtaaacgtaagataaagaataaagtaacgaaaactgcacaaactacaccatttgagatgattgcagtaaggacatcttgagttgatgtagatgtagcagtactagacattgcagttgacgtttgaaactagggtggcaaaagaaagaaagtgtagaaacaaaacaaaataaaatgtaaacagggcacaaaacccagatcaatccaaaagagggaaaaaaagaggcaatttaaagttgaaaagtttttgctaaaaaaaaaagaaaaaaagaaagaaaaaacttccctcgctactgaaaacaatagaaaatggtacctgaaacaatagtgatataatgatataatgattacaatattatgactattattgactattatgacttaatattataaatttatataaaatattctgcatctagaactgtctcctctgaacctccaaatacaacaaattctctatttaatttttcatcaatctttaaaactgctgcaacattaccacatctaccacaataatttggtgctgaccaaactgtaattacacctccattaaaatgatccctaaatccttccattgctaattgatgtgcccttgcaactccattaaaattattttcatgtaaaaatctttcaactgctaatttaccgaaaaggaatccagctcctcttggtgataatgcccattcaccttccattgaatcatcgggatctgaccaaagtaaatcacaaattggtccctcatgtggtacttcatcacatctatcaatacatcgaatttcattaattttactaatcattggtgataatcctccatgaacacacataatagaattttcaataactgcaactaatggtaaataatcaaataatgaacaacatcgtctccaaatactactaccattagaaaatttccttatacattcatcataaaatccataaactgctgtaatttgtctactttcatgattacctcttaataatgtaaccatatctggatctcgtacctttaatgaaattaataataataatgtttcaactgaatatgctcctctatcaacataatcacctaagaaaagatatggtcctttactaacttcattacatatcgttactaaatctggctaattgtccatgaatatctccaataattgtaactggtgcataaatgggtacaacattaccttcacctataagtatttcctcacataatgataatagtaaaaaaattctccctctctgtgggcactttcatcactttcaactgctctattataccatctatatccatcttttactgtgtgtgtcccttattcctattagaactacttcaaatataaacaaccgtgtcgttaatgatgtcgtccgatttattatatttactatgagattacgtaacacaatgctaaaatttaacaaagattacgtaaataatcaatgtaccacttatatacaacagtacttacttctataacaaccacactgcaatgacaacaaaaccattggtgccacgaaaaccatctacattgcaatgcaaacagaaacgtccccctgttcctaaaaaaccaataaaacttacatcaacagatataactacaagcacagatacagttaccaacactagacctgcaaaaccaacaataccaacaaaacctaaaatacaactaccacataaacaaccacccccaacacctaagaaatcactaaatgcaatatgggcagtagctgcacagagaataacacatcgtcacactttaccaataagtacttttccttataataacaccaataccaatactaatatcaatactaatatcaatactaatatcaatactaatatcaatactaataccaaaccaatcgcttttaaaccaaaacagaaaatccaacgcagtaataccactccatctaacatatcacatctcactaagactcgttcaagaggtcctaaacgtcgactaccaactaaagtatagtaattacttatgtagtatttcggcttacctgcctaatcgggtaactgctttccacgggttacatgattttatcaccaattttttaattgaaatctgattgcttactgttatgaatctttttacagaacctttgtatagaacaatatagacaatttcactctctttataatataagtagaatacaatgaaacctagtaatctggccattactagtaactttaattacttcaatatactttcatatacaatcattttataggtaattcaaatataataaatgataatttccctgatataataaatacttcatatattgatctactaactgatgcatcatcatcaccaactggttggaactgatggtgatagagtattgttcttagtacctttaagagatgcagctgaacatttaccaatgtttttcaatcatatgaaaaatatgacttatccacataatttaatagatttatcatttttagtatcagattcaaaggatgatactcttggtatgttaaaatctcaattaaatgaaattcaatcaagtgatgatccattaatgccatttggtgaaattgaaatttttgaaaaagatttcggtcaatctgttggtcaaggattttctgatagacatggatttaaagctcaaggtccacgtcgtaaaaatatggcaaaggcacgtaattggcttacttcaataagtttaaaaccttatcattcatgggtttattggagaggatgttgatgttgaaactatacctccaacaattttagaagatttaatgtcacataataaagatataattgtaccaaatgtttggagaccattacctgattggcttggaggtcaacaaccttatgatttaaatagttggcaagaaagtgatggtggtttacaattagctaaaagattagatgaagatgctgtaattgttgaaggttatccagaatattttacttggagaccacatttagcttatttgcgtgatccttatggtaatccaaaaactgaaattcaattagatggtattggtggagtttccatattggcaaaggcatcagttttcagaatgggtgcacatttccctgctttttcatttttaaagcatgcagagactgaaggtttaggtaaaatggctaaagcaatgggattagaagttgttggtttaccacattacgttatttggcatatttatgaaccttcagatgatgatattaaacatatggaatggatggcaaaggaggaaattagattagctaaatggaatgaaattatggatttatattataaaaattttaaaaattcatttcaagaaattaattttgatgattgggaaaatgaaaagaataaaatgatgaaaaatagtgatccttttaaacttgataggaaagttattgttgattggtctgaataattcattttctataaataatattacttttagttgtttgtatatatatacatcattaaatatctaattaaaacttacgttgattcacctttatctctcttaaatgcaaaacttaatttacgtgccatgaatcctcctccacttccaccactaccgctaccgctaccgcttccactgccactaccactaccactaccactgccatgtgcattgccattaccatttgtagcatcttcaccactttctaatgatgcactcattgaatttcttgaaccagaaattgcacttactgccgaacctgctgaaactccagaaacaatggaattctttctttgtaatttaaaaaatcttgatgatccaaaacttgtactcttttgatgattagaaacgtttttactaactttatcattccattcattaccatgttcattatcatgtttactatgatcatgatgtttattgtcatctttgttattatgaccttcatctttatgatcatcccttgttggactactaccaaatttaccaatcatacttttcagaaatgatggagatgttggatgtgctttattttcaatgtgttcatcatttttatgttcattaattgatattggtgcatccaagaatgaaaattgttgattttgaatatcattaatattattaacattcatattcacacccatatccaaattactagtatttggatttaaattcataacatcattcatattcatgttcatattcatattaagtgaatttaatgtattgattgaatttaatgtattaatattggaatttatattagaatttaaattagaatttaaacttgaattcatgtttaatccattcatattaattccattcatatttaaactattcatattcaaaccatttaaattaaaattattcatattcaaaccattcagattaaaattattcatatcgattccattcatattaattccattattcatatttaatccactcatatttaaattatgcatattaataccacttaaattcatatcaattccattccaattattattattatgacttgaatgatgtccatgtccatgtccatgatgatttttattattaccactactccaaatactactaccaaaacttgtactacgacctcttgaaactgcaaattccatacttttctcatcgggtatagtagaattattactatttaaagtattaaagatattagatcctctatcaattttattatccatttcattttcaccattatttaaagtattactcaacatcattgaaactggatcaatttcatttgatatacttgcatttggttctaattttttagaatcaaatggtgatgtggtagttatatcaattaaattattgattgaatgtggtgaatccatacttttaagattaacaatttcattatttaatgcacctaatgacgtaactctatgatgttgtggtgtggaattattcattacaatattattcattgatggattatataaatcaaacgaattgatttgtgataaatttggtgatgttgctaatatattattattacttgtatttgcagaatttgtattatttgaatattgagtatttggtggaatcattgattgagaattaaaagcattaagttcaggtgataaacctaaatagttgttattattattgttattattattattggaaatttcactctgtgaattagcagtagtattggcaggagtaccttgaaatgaaccgtttgttaatattttcggacgtaaattttgaattgatgacatattcgaatagttaaatgcctcattcgatgatgatgatgaaactttgttttttgatataatggattttttatttgaatcaccttcctctgaatctatctcagagtcagtttcatctggggttatttgtttatttatgttgatatttgaattaagcaggttgttacttgaattaactgcaatattattacttgcagattgtaatgagttgtaaaaatatccattagcattgatattattaatagaagttgttgggatattgttaacattattattattattaataatgtttttgatattgatattattaacattattttgagatgataataataaactcaactttttctcttcttcaatgtcagatttcattttattaaatttaatccattcagtttgttgtaatgttttataatcagattcagccttagcatcaattgcaacaatttgatcatataattcatctttccattcaggttttaattcaaataaaatctctaaatttttttcaccttccttatttaaaacacctgtaactttatcaatattcgcattaataatttcaaataattcaataattttagattttttaatctctaaagattttcttaattgaatttcatcccttaattcatcttcatttatatgaacatcagattgtaatgaaaaaatttctttattcaaattaattatttcactctctgattttttcaatgattcaggtgtatcatttgaaataaattttttctccttattcattaattcaatttccatttcccatttttcaatttgtgtattaaacatttcaatcttctttaatctttccttgatttttttctcttcaacagatattctagttgctgctttaactctttgctcttctaacagtttaatctcttgacgtagattcattctattattatcctcatatttcctcctatctctagcttcatccctagttgctaataaattattttcttcttctttaaattcattctctaaattttcatatgttaacattaatgaatggacctcctccagcccactctctaatatccatttcagttcatttatatcatcaattaattgtggatgctttttcttatcactaacccctgttgtatttgaatgattgttattagtagtactattattattaggattattaggatttgcactattatcaactgtaccacttcttgatctagttgagattatattaacagatgacttgaaggtatcatttttagtcagtgaagctctctctctttcacgtaataaacattgaataacattatcagtattttctaaactttgtaatccatccattattattggctttgcagcagttttaataaaaattggtgaacttcttgatctataaccatctttattaaaagctactaaatctatttgataatttgatccaggttgtaatgataataatgtacattgattatgtttaccatcaattgttaatgtttcaattccattaatatataataaataatatgatataatagattcactaagtcctgttaatccattattttctttcttgttatcatttgtggaatttgatgaatcattatttgaatgttctgcatcccaatggaaaacaattgaagtatctgtaactttatcaacggataataatggaattttaggtattggtatattaagagtttttattgaagtttcagttgataatgacatcaataatgataatctattagttagccaagctagactggctagcgctagtaatattatgaccatcatggttcgttatttaatgaagagatttgtgaagatgttgatactaacaccctggggcaaatcaagtctatcaaaattattacgtgaaaaatatcgacatttttttcttaactaagcgttttggtattgtgagagatcaagttttagagtttttaaatttaattttactttattttgtattgtacaatatctatttaggttatttagaaaagagagagaaataaagagtgtatatctaattttaattgactaaagtcttactagaagatatagatgcggaacgataaagtttagctgcaccttttgtaatataaggatttttcaaagaatcttgataagcttctaataaagctaattttaaattttcaattgattgaggagaattttggaaatggaatgcaattctattacccattgttttaacattatattttttagaaataacatcataagtatgtggatttattttaattttctttgaatctaaaaatacaaaacttgtatcaagtggtgattctaatggtatattattttcaatacaaaatttaccaaaatcttttgcataatcatgagattttttaattttatttaaatttgaatcaattgcaattgatgccattttagctaacataccagcttgtcttataccaccaccattttgctttttaaaatgattacatttttcaataaatttcttttcaccaacaagtattgaaccaaatggagcaccaattgattttgataaacaaattgaaactgaatcaaataatttacaataatcataaattgaaataccagtttcaacacttgcattccataatcttgcaccatcacaatgtaataaaataccttcatttttacaccaatttgaaattttaacaatttcatcataaggagtaattataccatgtaatgtattttctaatgaaattacctttgttggtgccatatgaatatcaccatcatcaggtatataattatctaaaatatcatctaaggttaaataatttttatttagcaggaataactggtgaaaccattgcttgtgataaagttgctaaaccacctgcttcatgagtataaatatgagctctataatcacataaaattgaatgaggtggttggaaaagatgtgctcttaaagcaatttgatttgacattgtacctgaagaacaaaataatgcagcttccttacctgacatttcacaaagttttgtttctaaatctaaacaatcttgatcttctttataaactgaatcaccaactgaacaagttaatactgattgtaacatttcttgtgttgggacagtgaatgtatcacttctaaattcattatgagttgggaaattatctaatgtcattttaatgtagtgttttatattatattaaacctgttaattgaaacagtacggaagagattaaaacaagagaaagaaacctaaattgcagtcctccatcaaaagggaaaaatagaatagtatttataaccaattgatgagtaatagttgtaaaccatacaatgtacttctggaatatccgattgactaatagataataacggaaagtgcctttttcagtgaaaattctcatcggaaaattcgcaaaataaaaaaacggtgaaaaatcactaaaattccgcccattcgagggaaatcatcgattttcaaactattattataagatcaatttaaatgataataagtatctagaacatggtagatatgggtaattgatatcaaattttccatattttagctcatattaaatgaattgggttattttggtgtaattattgatgataatgatgtttaatcatagtaattcatattaatttgagggaattaaattttttcaattgaatatcggaaaaaagtggatataagatggtgcggatgttataattaagagggtttgattagttaaagaaagagggttaattataactaagtgaataacataatagatggttagatagacaatagataagaatagtataaatataagacaagatgtaagttaagaaaagttgtaaaaggaggttagaagtgattaaagtgatgaagatagtgaaataggggcaatatggggggaatataacttcatcggagaagttacagtgacttctgtaaaactatagtgacttctacaattttaatgtgacttctacaatttggatgtgacttcacctgacttctgctgacttctgacttctacttaacttctaccacccaacgtacggctgtgtaccataatatcattgacttctttattttacctgacttctcgctatttttttttgactccagttgccaaaacggcagtcaacccggcagtttctttacttgtgtgccaaaaattaaagtcacgtgcctgtcacgtgatcctaatatttttaaaagtttactgttactactggtaatagtagtactgaaatactaatgaatagattactaacaatatttacaacatatcacaatacaataatacactctaataacactacacctaagtaagataaaatttccgaattgtatcatttcttttttcttttgctaaaaatgtctatatagataaataatttaatgttaataataataataataaataatactagtagtaattacatacaaacacaattaagcattaacttttcttacaccaacatctctgaaaactgaatcagcttcactataacctctaccaagtccaaatccaacacctaaccaaacagggaatgatcttctcttaaataaaagtactgaaactaaaacacctgtaccaaaacctaaaccagttttaacaattgcattagaaattgctgtatcccatgcacttgaaacaattgatgatgatggtgtattagcaattacaggtacttgtacttgtgttgtttcttgttgtgacattgtttgtttagtatattatattttaaaacagtcaattactctccctggtaattcgatgatgaaattcatgtcctatacttaataccattacatactgaaacaatccagaaaagtcccaaacgacgcgacggccccttctggtgtacagattaaccctttcaaccaataaaatttcatattctcaattaaaatttccacgcgctacatcaatttcaaatcaaaattccatattttttcacctcgttttggttcccatttggcaattatttattgttgaacattgcaacggattttatatctaatttcctttcgttatttttttttactttttctttccttttcattgaacaaacatgtctgcatcatctgcccctgttatcccatctttcacagttttagattactctaaattcgcacttgctggtgcaatcggttgtggtattacccatggttcaatgactccaattgatgtcgttaaaactagaattcaattagaaccaactgtttataacactggtatgtttggttcattcaagaaaattatctcacaagaaggtgcaggtgctcttttaactggtttaggtccaactattactggttattcaattcaaggtgctttcaaattcggtggttatgaattatttaaaaaaatcttcattgatgctttaggttatgaaactgcttcaaattataaagatgctgtctatattggttctgctgcaattgctgaattctttgctgatatcgctttatgtccattagaagcaactagaattagattagtctctcaaccaactttcgcaaatggtttaattggtggtttctcaagaattttaaaggaagaaggtttaggttcattctatgcaggtttcactccaattttattcaaacaaattccatataatattgctaaattcttaacttttgaaagagcaaatgaagctatctataactttatttcaactccaaaggatcaattatcttcatctgctgttactggtgttaatttattatctggtgtcattgcaggttgtatggctgcatttgtctctcaaccagctgatactttattatcaaaggttaataaaactaagaaagctccaggtcaatcaactattggtttattaggtcaattagcaaaagaattaggtgttatgggttcattcgctggtttaccaacaagattagttatggttggtactttaacttcattacaattcgctttatacggttcaattaaaggttacttaggttgtcctccagttgttacccttggttcatcatcccattaagttaagtaattgttaagttattttctttatctatctatatttatattattatttatttaacttattcttgttaattaactgtattcattatattatattatattatattatattatactacttaatttatacacatattaaacaactggttcttgtgtttgttcttgtactggaacttgttcctctaccggtgcttgtggttgttcttgaactggaattattggtacatattgttgttcagattcttgcattggttcaggttgaacatctgaattaccattcatataagaatctaattcagttatctaattcatcaatagattttggtttaaatttcttttcatttttctttttattattattattattattatttttacctttattattattctttttaattggaccaatattaataccaattctatcaattaatggagtatttaatgaaacattaataacttgacctgcagctaaacgtccatcaaatttatcaactgctttaattgcatcatgattatgaagaaatttaataaatgcaactccaacactttgaccttgagtatttaattttaattcaacattttgaactttaccaactgtattcattaatttctctaaatcatttgatgttaaatttggatgtaaattagtaattttaatttcattactacttggacgctttttgaatgtttgtttattattattatagttattattattatgtcttggtttggaaatcattgatttaccattcttacgtttattattgttaaatttctatattaatctgttagtattttgtatttttatgaataatataattatatgcattacatactcttttacctgcatccttaccgataatggcatctaatgattggtctaataatgatgacatccttgtctgcagaataaagaaagttgtcacaccttattatcaactaattttgtgtcgcccaatatataaatttcctcaatctacacatgtgttcatgttaaaatttcaaatctcccggatataagtttaagcttacagaacatttcattacattaactactttactttctttcaatcgaactattacttttacatttaaaaaacaaagggggaaaacgttatataagatatatataatggcacattatcattctttaggatattcattattaagatactcacttgccaaacgtccaagtgtgtctaacatgtgacctccattggtcggagataagatttgtgcattttgtattggagttgcagttgatgatatcgtattagtatttgtagttgtattattattattaatagatatgggcagtactgaagatgtatttaatggtgacgggaagatatgaaaatccactattattattattattattattattagtggaattatttcttatacttgattcaagtattgcaatatgttcacgtaaatgactgattttcagttaatgcaactttaagtttttcatttttaagtgtatttgcatatttaattaattttaaatttcttgaagatatttgttcattctcatcttgaattattcgtaattttttctctaatccttcaatttgagctaataacatatatctctccatttgatattcatccttacaagatgaaatttcatttttcaataatgtatttttcaaattcaatcgtagtaaaatatttttaattgattccatcaattgtatactatcagaattattactcgttttatctctattattgtcaataatattttcaattttcattatcactttagcaacttcactatccatttgagttaaatccattcttaattgtgactttaataaaggttcatcattacttggactactacctgatgatcttgatgaattctctaaacttaaatcaccattattaccattaatttgaacagtttaaattttcgtgtccattttcgtgttcactaacacgtccattaatacgactttctgcggcattatcaacattcattacttgatctaaatgtgtatccattcttggagattgtagcaatgtcggtgagacaagtatattagctatatgttcctgttttgtgtccattgagttactctacagaaataaaagtttataataaaaaagacgtgtatactgatagcaattttactacaccaataaaatattaacgtgtaatgtcatactgagatttctcccatagaaggtccccttataacagaacaatttacccccttaactgcccttcgcgttgtttatgttaaggccactgtgggtgattactgggaaggaaggtaaggtattcaactacctgtctatgttctatattataccctgtattgggataagagatacaagatagtaactaatattataataaagtatagtgaagtaaagaattggaaaagagggcaatttgattaggtctttcataccacttctttctactggtaatggtacttgtggtgatatctcattatatacctgatatacctgcaattactcatatagtagtgttgatatggttatttccactatctgcattgttcataatactattcggaattactttattgtatgtatttcaatttaaactcacattttcttcatcagaatttatactaacattaattacagaattgatcatctcacgggttctccactaactaatcgcttgaaagtactactatatggtgatatttttgaaaaggaagtttattaacctgtacgaggttactacttaacagatcgtgtctcctaccccattgggtcactctgaaatatttccgttttttaatatgggactctgcgcatgtttcccgatgcggtaactcttgcgattatgataagattacattcaagatataataagatatattcctacgagcatgttatattataaatactgatagttatacccccatcatctcttcaatattccatctcttcactaaacaaaaggcaaaatgtcttttagattgaccaatgttttaaaaaaagtgacatcaaaatcctatatcggatcacgttcatttgtaacatcatcatcatcatcaactagatcatttaaatacaagtcattatcttcatcttatctatatctggcattggctgtatcaacttcaactttactttacacaacttctccaactgttctcaatgactctaagaaatcaaaaagaaaaatcattgtcattgaagactgatgacgatgaagaagatgaagaaactgaagaaggaaagagaagaacgtttagagcaggaacgtctagaaagagttaaaaataaaccttcactctctcaaattttcaatatatcagattttgaatatgttgctaaacagattttaccttatggaacttggggttattattcaactggttcaggatgatgaattttcattaagagaaaatcattatgcctttggtagaattttcttcaggaccaagatgtttagttgatgttaagaatacaaactactgaaactgaagaaatctttggtattaaaatggatgccccattttattgtactgcatttgcaggtgctccaatggcacatcctgatgctgaaaaaaatttaattaatgcttgctggtaatgaaaatattccttatttgattcctttccaattatctttcccgtttgatgaatttatggaaggtgcaaaaccaaatcatcaaaatttccatcaagttcatttttataatgaaaaacaattagctgaaggtcctgcttatttacaaaaaattgaaaaacaatatccaaatatcaaagctttttttattaatgtcgatttaccttgtcttggtaatagagaaaaagattctaaaattagagcctcattagatgattcagttaatgaagatttatcagtttttgcatcatctaaagtctcatatttaaatataacttgggatgatatcaaagttttaaaagaatcaacctaatttacctatagttttaaaaggtgttcttaataaagatgatgttttaaaagctgcagaagttggtcttggtggattgtttaatttcaaatcatggtggtagacaactggattttgctatgccaccaattgaaattttagctcaatcaaggaaattattacgtgaaaatggtatacctgacaaagattttaaactgtttattgatggtggtattagacgtggcttctgatatcattaaagcaatttgtttaggtgctgatgctgttggtttaggtagaccatttttatattcaatggcaacttactggtcaacccggtgttgaaaaggcaattcaaatactgaaaaatgaaatgattgcagatatgaaattacttggtgtaactaaaataagtgatttgaatgaaaattatgtcgatattgaatctttgaaatataaaggtatttcatcatctgatcatttatacaattataattatacaaatattccaccacctccatttagaagataagaatgttcatatagttattgttcattcatattatatttatacgtactatgtaaaaaagtaaaattatctagagtgtatagattatataaaacatagaatagattatagactaataaaattgttccatcattatatatcagcagcttcatcctttgaagttgtagttacagttgttttatcccaacctaaacgtttatttaatttttcatatttagctctatccttatcactaactgaaggatttgttgaatttaatgcattatcgaaatcatttgctgtaacttcaacatcagttacatcatgattatcttcatttatattttcatctaaattttgaatacctgtgaaaattttccttttaagtgcaataacactggcttctctgaccaatgatgataaatctgcaccactgaaatttctacatcgttcatcgtgtgcaatattatgtaaatcaacatcagatgaaattggtgtaccatttgatttaattaaagttttcataatctctaatctttcatttgcatttggtaattcaatataaagtgttttatccaatctaccaggtctaagcattgcaggatcaatcatatcaggtctattagttgcaccaataacgaaaattcctcttctattatttaatccatcaagttcagttaataatgtattaacaactcttgatgaactttcacttaaacttgaatctctacgtggaactaatgcatctaattcatcaaaaaatataatacatggtacacttgcccttgcccttgcaaaaacttgtctaactgatctttcactttcaccgacatatttatttaataattcaggtcccttaactgatatgaaattagcctttgattcatttgcaactgctttagctaataatgttttaccacaacctggtggcccccacattagaacacctgcaggtgcactaataccaacacgtaaataaatttcaggacgtttgattggttgaacaatagccatatgtaattcaattctaattttacttaatgcaccaacatttgcccatgaaacatctggcacggttgcaaaaccttcacgtttagcagttggttgaatcgttggtaatgcagttaagaaatcttcacgtgtaatggataatggttcaagttgttttgatgtaagtggttttggatgtttttcaaggaatttttgaataactgaaagttcctttgtcgttgatgttgttgttaaatgaattggtgatttaacttcttcttcaagtaatgatgatgggttagatggtgttaatggagtagttaatggagtttggaagttttcaatatcttcatcattttccatttctatatccatatcaatttgttcctctaactctgatggtaatttaccttcagaatctgataatgaactgaaaattcttttaattgcagcaacaccggcagatgtaaccaatgcctttaaatctgcaccaacaaaacctggtgtcattttagccagttcctttaatcctaaatcaccggatatttttaatttactcgtcatactttctaaaatatgcattcttgcctcttcacttggaacgttaatactaatttctctatcaaatctaccagctcttcttaatgcagcatctaaactatcgggacgattagttgcaccaataacaataactggtttaccattagtattttctaaagttaattcatccatacaagttaataattgtgcaacaattcttctttccatttctctttgtgcaccaccatctcttttaggtgtaattgcatcaatttcatcaataaatatcaaacatggagctaatgattttgcttcatcaaataattcacgtacttttttctcagattcacctgacataccactaacaacacttggtgcactaatatttataaatgagacacctaaatcaccagctaatgcattagcaattgttgttttaccacaacctggtggaccatgtaataaaacaccacgtggaggttgaatacctgttgatgtataaatttcaggatgtaaaactggcataccgacaacttccattaattctgcaaaaacatcatctaaaccaccaagtgatttaagtgacatctttggtggtgacctatctactttaacacgttttttaccattatcttggtctttattacgtcttttctttgatgattccttcggtgattccttggattgttcttgttccttttctttatccttaccattctcactttctttatcttgatccatgtttttccataaactaacaatagatttattagcgagatttaaatcagttacttccattaattcatttactggagtatcatttgatggtatgtctgaattatttaaacctaatgttgacatttcctcagcttcttcatccctaatttcggaccatgtacgttcaatacttttccccaatatatccattttcatgcgtccgagtcctttatccttaagtcttatatattgagatatttcatcaaatgacaaatctttagccaatgccatagaaaatgcttcacttgatgaatctgtctttggttgtgactttaaagtatctgttttatcatcctaataactgtaaaatatgattataaactttattatctaaatctctttgaatgagacctggcttagtcttttgtttggacattgttctctgactatatctaatcaactgcaactctaaagataggaccattcactgatagaaaaaaaattcatgaagttgaaatatttttttttgtttcagaattttttcctcagctgaaaccacttgcgcagagttcgaaatggtgttagtagctacaagacagttttttaatacaataattgcatgtataagaggtatatgagttatataaaatgataaatatcaacatgattaatgactttagctaaaatcagcaacttcgattcctagtacattcacccttttgaacagccataacacatcttttataatcaaaagctacttgccaaactgcaccatcaatatcttcaaccatattacgtataaattcaccagttttagcattccataatttaagcattccttgactacctgagacaactctataatcatcattttcaacacaagttattgcagatgtatgacctctaagaacatgacgtggtaccccagtatcaggatcccaaattctaacagttgaatctgctgctgcacttacaagtacattaggtgatgatgatattaatccaactaatatcgtatgaccttctaatatagctgtacattcacctgttgataaatcccatattcgtacagtattatctgctgaacctgtatatgccctatttctaacaacatcatagacacaactataaattctatcagtatgaccattaagtacatgtaaacattcacctgttgttaaatcccaaactctagcagttgcatcataactaccactaattaagatacgaccatgaccagcaacggctctaacagatgcaacatgacctttaagtacaaataataaattaggatttgtatttgcatctaattcaattggtgttgttgaatttgttgttaatggtaatttccaaacatacagtgttgtatctcttgaaccctgttattaataatggttcagttgggaaaataattggacgtcccataacgtctgtacctatttgttgtggttcaataatttcaagacatctaacagttgatgtatgacctttgaaaacatgtgtacatctaccagtatctaaattccaaatacgaactgttctatcagttgaacctgatgctaaaatatttttataaaatttcattgcccaaacaccacctgtatgacctttcaaagtatgacgtaagagacctgttgatgtattatatataagtatttgatttgtatttgaagcctgcagcaattttatcattcatccagttgcagacatgtaacaacattaagtatttcacctgtttgtaaagtataacgttttggattatatgaaggatccatccaacgttttaaaactctacgtcgaatatcataaactattcttgatgggaaatctttttcctttgataattcatcctctgttataaggaccttcctttaataataaaatgattccataattcagggtgtgttgttgccagttgattccatttacgacatacagcagaaactgatcgcagatcttcacttggtaaatgtgataatattttaactgaaagttctggtggtaaacttgataaaatatctttccttagtaaatttcctaatgctgcatgaactgttgataacattaatctaggagttttctgcataagggcagcccatgtagtctctgatatatcaagaggtaaaggtggaggtgagggaagaggagaaatgggagactgtggatgagtattaggtctcttagttggattagagggtggtgtagaaggatgtttcattgtcctaggatgaatagaaactgtttatagatatatatacaatatatcgatgtagcaataatatagtaataacaatacgtattatggctattcgtcatctaaaaattgttgataaacccaccactgggtggaaaatctggaaataattagcaaagttacgtaatacatgatataattgcttaaagtggtagcaatttgcatgatattactatcatgttgtcctcttgaatcttcttgggagatgggactgaaggtacatcacctggccacttgatgttttattattttattattgataataaaatctaaaaagatatcgttaaaaataaacattcttatatagcaaaaaaacttaccaaattacaccttgataatctcaaatactagcaatgacgaatattcaactgattcagacaacagtttttgattcctttgtagctttaactggaatttttgaaactttaccagctgttacctttggcttcttattttctttaccacttgctttagctttttccttaatatttacttttttagcaacagaaataggtttaagtgcagaattaagtgcagaatctattgctgattcagcagtaggcttagtaaatggttgagctacaggctgaactacaggtttttgttttggtggtattggctttggaatttcataattgttaagtttttcaacataatcaactaaatgaagataactcactttctttggagggaacctggcattatcctcttctctttcttttctttctttttcagccttttgaacaacgtttttcttctcttttctctgttatttgagtatgcccaaaattgagggatatcatcataactgtaacaaccatctgtattggaactgtcaattatttcatggaaacgttcttcggtttcaacgtcaactttggcaaaaggaacattatcaaataatttaccaaaattacccattaagcatggaaaaatattataaacaaattcagcttcaaaataactacctacaaaatcctttttaactctttcagtcatttcattcattgcagtttcaaattttgtttcaaaatattctttccaatcattaactgaatcatcaagatccttaagtatgagtctacgtgttctttcatactcttcccgtcttttatcatcttccatatataagtatgcaaattgcatcatattatatagttctatcttttcaggatttctctcaggatcgtaatcacagattttgtagtaatattctgtcggaatatttttaaagtgaaaaattggatctttttcaaacaaatcttcctctttttccatggtgcttcaagtaagaagattatcaaaaggaataaagcaaaagaaagaaagacaaatgataagaattgggaggctcatcatatagaagtggtttataaaacgcgttttacattaccaaaatcttatcagtgtatatttactattagaggtatgtaggtagcctgttaaataatagccatcccgtcttttggtatcacaataatatcactttaagtagctaacgatagtttagataatatatagcaaatcattaaatgaagttaagtattcagttcttcaaccaatttatacttactttgtagcaacggtacttactttctttgcagatttaactgcaacctttgatgctttagaaactttaacttttggtttctgattcttctttacgtttgtcttgactttttcttttacatttacttttttagcaactgatataggcttgagtgcagctttaggtgtagtcttagctgaaggctcaaaaactgacttaataattggcttagcacttcgcttaccacttgggttagcacttagtttagcacttagcttagcacttggcttaatgactggtttaacgacagattttggaattttaagctgattaagtttctcaacataatcaaccaaatgaagataatttggaggatttaaagcatcaaactcttccttttgtttctttagctttgcagctttatcaagcattgacttgatttttctttctctattctcagaataattttcaaaatctggaatctcatcataagtaaattcgctatcttcaacaaatctatagaaacgatcttcagtttcaaggtcaagttttgcatatggaataatatcaagtagttgctcaatatcaccttcaacatcttggaacttctcccacatcatttcaaattccattaaatctgaaaatttcgctttaagtctatcatccattgttttcattgcagtttcaaattttgtttgaaaatattctttccaatcactaactgaatcatcaagatccttaagaacgaccctacgagtacgcttataattctcgtatcttttgtcatcttctaagtataaataagcaaattgcaacatattgtataattcgcttctttcggggtgtttatctggatcaaattcacaatgcttatcataatacttacctatcactcgaatatcaataaattcgtgaacaagttcttcttcaaaccagtcttcttctgtttttaccattgtgtttagtttaaaagagctgtgccaaagaaaactaagaagaaagcaaagaagaagataaataataaagataaaatgataagaataaggaggctcatcaataccatacataaaagataacgcgatttagtttactttattttaattatcgttttattaaacaagttttacagtaattctcttagaaaagaactcttttttagatggtttgaagatggtagaagaattggatatatcttttaagcttcggctgatttggtggtcttagtggtaacctttggtttagtaacttcggcagtgatagtattggctttagtaacattagctttggctgcaggttcaacaattttcactacctgtggctttagttcaggaacttttttgattacattattcaatttctcaataaagtctaataaatgtttattacctttaagtttagcttgcatttcttcaccttgtataattgcttgtgcttttttttgctgttttgcagtcttcatggccatcaacttaattcttattcctctatcgtccatatattcaaaccaagctggaacttcgcaatctttacatcctccattagtccataaatcatatacattttcatataatcttttttcttcttcaacattgaaccttgagtatggattgagtgcataaagtttgtctaaattacccataatagtgggtactatagtcagagatatatacactgcttcatcatcgtaagtctatgtatattctttctatccttttcacgaatttcatcgacggttgggtaaatttagtttgaaaatattcttcccatgtaccaacagtgtcatctaattccttcaaaacaactttacctgtttttttgtaattttcatgtctattatcatcagataaatacaaacttgaaaagtttgccatatcaaagagatgcttcttttctggaaatgattctggacgtaatagtgtatctatatctctccagttattacgactgtaaagaaaaaactcacttggttctgtttcattgtactccaggtatttattttcgttcatttttaattgtctgtagaggatgtagacagtaaaattaaagaaagaagataaaagaatataaaaataaacaaaacaaagtttcgtgtcactctttgacagtttttaaagagtacgcgtaaatgttttctattgcttatatatcgatgaggttatattatataccggatgccatatagaaaaggaatctctaatgtaactggtttatggttgaattatagttgatagacaacttgggtttatctattaagccttaattggtttggtagtctttttggtattttttggtttagtaacttttattgtagtagtcttagctttagttactttcggtttagtaactttgcttcagtagtcttagtttagtaactttagctttgctacaggtttaactttggtggtcttaacttttgctgctgtttagataactttaaccacttgtggctttggttcaggtttttttctaatttcattattcaacctttcaataaaatttattaaaaatttacaacctccaatttcggattccatttccaaaaatgtttgtttcaaagattctttctgttgttgtgtctttttagtcattaactcaatattttcatttctattatccgtataatcaaaccaatctggaatctgatcttcatcaaaacccatttcagcccaacaaatctcaacaatatcatataaacgactttcttctttaatactaaaccttgaatatggattaactgcataaagtttatttaagtcaccctcaaaatatggcaatatctcttcgataaaagaattctcttcatctgattcgatatattgttttctatcctttgcacgcattttgttaatctctgaaacacatccatgttgttttgaattaaaatattcctcccatgtattgaaagagtgagttagttcattcagtacaactttacctgttttcaaataattctcatatctttcatcatcagatcagatacagacatgaaaaatttgccatcatataaagaggaaagtttcttggatctctttcataacgtaaaagtgtatctatttttctcaaattattacgactgtaaagaaaaaacttactaggttctgtttcagagtattcacagtatttttcgtattccattgttcgtagttgtgtatatatgaaataaaatggaataagaaagtatactaaattgtaatacaaaatcaacgttttaactgtcacaatttccagtgaaaaatttcaaatttaatgacgcgttgataagcaaagacgtgtctctattttacaattaaggagtatattaatatgattggtattgattatacatgatctttatattttattgaacaaagttcctcttatagattatttcttctttttgataactttacccttagttaccttttcactactatatttatccattatagcttgcattgtactattttgacgatttctattttcactgattttccttgcaagttcttcaaaactatcgcatccttcatcctttacatatttatcagctgcctttttctcccttaatgctttacgttccatctttttcaccctttgtttcctctcagaggtatatttagaaaattgtggtatatcttcgtcctttagttcacccttttcaatgagtttttcgattattccatacactctctcctcttcttccttactgaaactctaaatgaggaattctttcaaacaatttttctacatttacccttaatatcaatcatttcatctctaatatcatcaagttcttcctcgctagttctgatattgctttttatcttcaacaatcatatctttagtaacttccttaaattgtgtttggaaatactctttccaatcaaaattttcatcattttcaacttccttaacacttactacacctgtcttatcatatctttcacgtttcctttcatcagataaaactaaataagctaattgtattttatcaaattcttctcttttacctggtgctttatcagggatgatatttcaaacattttttacggtatgcaacaactatatctctcttatttgaatctgatgatacacctagtatctcatatgggtgtatgttttccattggttgtgttatgaaaagaagtaataaccattaaaaaagtgaaatttgcatttaggtagggtgaaattttatgtaacgcgtctttaatatgacagctcttgtttcagggtattgtgatttaataatcctatttactgacatagattatagagattatgtgttcattttataacttaattgtgtaatttatgagcctatttgtagttaatactgtaaaaaagagaccaaaatatgtaaaaaagttattttaattatttttactgataaaataatttggaaaaagttaaacaaagctgtacctttatcattttaaattaacaatttcctaaattataactatttttgatcttttttaatttactatcgtatggcaagtgcatataagatagtcaatatctaaatatcaagagttatagagcaattttgaacatactagtaacaatcaaacttttaacattccaatacccacgacacaatatttgtcacagtcgattatacagtgtatttaacaaatacttcacttaactgtattttattaaaacaaaaacctttaatcaattactctacaatctattaattctatatatcaatttaactatttataaatatacaatctaaaactatctagattcttttaactggaccaccctggtgaagtagcctttctagcagttaaaacttcaacaccatcttcagtaacaagtaatgtatgttcaaattgtgcacttggtttaccatcagcaggttgttgaagtccatccatcaggccacataacatctctataagaacctaaatttaacattggttcaatcgtaaaacaaatacctggagtacatacaccaattgctttatttttagcataatgaggaatttcaggttgacaatgaaataattgattaacaccatgaccacaataagttctaacaactgaaacattattatcatctagcaattttttgaattatattaccaaattcacgaactggtaatccctggtttaacagcttcaatacatttatctaatgattctctagttgtttcaactaatctaactaaatcaggattactcttcgccttatcaccaacataataagtttcatttaaatcatgcatgaaatccatctttataaaatgaaacatcaatattaacaatatcaccatcaactaattttctcttatctggaataccatgacaaataacttcattaactgatgtacaaacagattttggataattaaaataatttaatggtgatgggtatccacctctttcaatacttgcattatgaacaattacatcaatttcatcagttgtaataccaggtttaacagcttcacctgctaaatctaaaatttctctacctagtttacaaacttctctcattttttcaatttcatcaggttttaaaacacgaattttatttgttctatcattctttaattcacttactggttcaccattcaatgcataatctggtttggcaattgaatctggaactaggtcttcttggtgaaagtgggaaagctggtttaacagtacctctataggcaaattctggatatggatcataactttcaacaccttcctttggatgaattgccttatgttgagcaaatgatccacggaaacatattgaattacagaaataattttgcattccggctttaagacaaattggacattttaaattagatgtagttttcttaccacaatttggtgctgcacatgttttaacagttgacatagttactcaagcaatgtatctgtttattgaaattatactcaaaaagaagcttaatccaacaataagaaaaataaagagaagaccttcccatagtaaaaatacatgaaattcaaaatgaccgtgaaaaattttattttcaaaccatcttcatttttgatatcatgaatgttgaatgttataactgattttattaacttctgttaggacatagtaacacatatctatctacatacactatatacctatgactacaagagggtttgtaaagctagagattgtacttccagaagcttgctaatttaccatcatcaacacattgttgttatgttaaaccacatacatcaaaactaccgaatcaacaacaagataatacatgttcattatttgttgtaaatccattacctcaaccaatgtggacactagcatcagtgaggacgattttccgtcaaattagttctgcaagtcatatatcaaatgttttattacatgattgtattgatgaatcacgtgtatcttcaataggtagtggagttaattatgatttacatattaatttaagtattttaagtaatccagatttaggatcaccattaagtgaagaggagaatgttaccatttggtacgagtgttgtgacatttgttgatagagatggattagaattatttttaactaatttaacaaatattaataataataaaagtaagaaaaaagataagataataacatggaagggagatgaaaatgtttcatttggatttgaaagatattctaaggtacagaatttagttaatagagatgaaatggagaaaattgttgccaaatcacttttagatttccaaaatcgtgaaaaggaagcagaggatgatgttaataatttaaagaatattgttgatgaagatggatttacattagttgttggaccacaacgtaagactaaatctgaaatcttaggttcattaagaaaaaagaaattagaaaaagatgttataactacaaatgataagaaagaaaaggaagatttctatagattccaaataagagaacgtaagaaacaagaaatgggtagtttattagctaaattcagggaagatcaagaaagagttaagttaatgagacaaagacgtaaatttagaccatattaagttagtttttatattgtatattgtataatatatttacttaatttataatctcccaccaggagtttcataatcatcaaatttatgtgaatcaccagtatcatcagtttcttcaacttgtctaagcataagtgaaggtgataatcctaattcatttaattctttgaaaacaacaacaggtttttcatcatatcttaaaactctttccttatcacctccataacaaataactaaaacataatttctccattcactacgatctaatctatgactacgcattgcagcttgtaatattttataacatggatcttcagttttagcacgtaattgtcttaatgtatcattacttggatcatcatttgaattattttcaatttgttcatgagttgaacgtcgtgatgatgaacgtctattttcagttggtgtttgaatagattgactgtgattaatatttgaacttggtggtggtataattttatcactagttgatgatcttttccttaagaattcagctcttaatggtgattgtacaggtgtagttgattttgattttggggtattattagattcaatcgttttattatctacaggttttggtaaaggttttgtgtcttgaatatcttttaaaactggtaatatctcttcacgtagtttatttattttagaaactaatgaatgataatctttatttctatccctttcatcatttttaactttatttattaatttaattgaagtctcatcaactatacctttagaaattgatttaattaatgaagttgcaattatagttgtctgtaattcagataatattggatgtttactatcataaatacctaatgataaatctttttcaacaattaattcacttatattatttaaaatttctaatcttaatcttaaattttcaatacccatttcctttaattcttcactatttaacattggtaatgtaataccagttatattatgaattctaaatgattcaagtacattatctggatatttattgtttttcaaccataataacacttgatcgttcttccacgtaaacattgcttactgaagtatatattgttgatggttcatttaatcaacacttgcatgatataataaatctactgtactaaaaatagatctttagatgataaaatacgactcgtcgtctataaaatatcacaccttcctaatcgggtaatctcatcgcgtttattgacattttgccgtattgggtaatctaattgaatttattaaaatttaaacaaagcaaattacttatttttatagttttgctattattttttttgtgcccaatgtatttattggatgataatatagatgaataaaaagattgtttgctttgaagtataagaagttagtttaattagagtcttatcattattatttatcattcaatagttttagtttctataagtcaaatcattgatcatgcttaccgatatatctaatagtgtgaataacacgaacataaatacaaatttaattacacatgtgtcaaatggaagtttaaagccattaaagatagtaagtcgtactaatcatcaattatacaacgatgagaatagaaatccaatattggttaagttaaataatgttagaaagcaaagtaaatttaataataaatccaatatcagtaaaatcaatactgataataatttaaggatgttagagataccaaattatagatttaataaaattattaataatgaaaatgatgttatttttccattttatgaatgtccattaaaaactgataatatttataaaaataatgaactaaaattagattttactggtgacattacatttttcaaaaatgtcactaagaaatattgtaatccaattaaattcaagtatattaagcaaaagaatgttataaatatgaatgatgatccaatgaaagatttttttatgcatggtaaggatgataataaaattaagtttggagataatgttgttttaatcaatggtaatggaacacattcaatgattcgtgatgttgaatttcaaagtgagtttggattcagagagtgtgatgaaattgagtataatgaaaatgatgaaatcttatatgcaagtgatgaggatgaggttagtagattagagaattctgatttagatgaatcaatagataaagatgagagtgaaagtgatgaagatattagtagtaataatagtaatttaacatttgatcttgatttagtaatggatatggatatggatatggataataatagttataaagaagaagatgatgaagatgatgataatgaattaatttcacaaaatatttcatcatcatttgtacttgataatttaaatgaatttaaaaaagcaactatgatatcaccaactaagagaacagttatattaagttccaataagaatcatggtaagagcaataatataatgagtagagttaatgatgatagtccaaaaaaacaagaaacaattttacgtaaattaaagaataatagttcaccaattaagaatcttaaaactcatagatcaggtaatataattaattctattaagaagccaaatcgtacaaattatagtaaatgggatagttcaatgactattagtgccaaggcaattatgaaaatggttgatgatagtcttgtttcaagtgatacagaagtttacaatcattcatatagttatttagcaattaagaattctaataataataatattaataataagggtaaatcattattagataatattagtattaatgcagcaggatttgatgtgtgcattgaatgatgaggaaggagatgttgatttagataataatgaattaagttaatcaaattcaagaacttgaaatcaaataaagtgatatttgtatacataaataaaaataaaataaaataaaaaaatgattccctatattttcagttctctaattgtatattgtatttttctttaataattaataataataaaacatattttctaacagtattatattatatgatgctataaaatgatgtatttatatataatataaagtaaagtaaagtacagactataatcaagaagtgatagatttaaaacctattatattatatagattttggtataacaacaaaacctggatcagatttacgttcagcacgcatatctgccttatccttataaacaggtgataattctaccttaactaactccttaactcttgcaatttgacctgcttgttgaggagtaattttatgatagacagtttgatgtcttctacgtaatcccaaagcatgtaaagtttccttgtacaagcttggaagaccaatagtagatctgagttgtgtgaccttgaagtacttagcaggagcagacattgtcagtggtaactaaccaaaagatgtaccaatctatactccagtgaaaaattgttcaactgttaaaattcatgttgagtttaaggaaagagagcggaaagtcttaaacagtggttacgtaagctactatgacgttttcaaattttcaaatttatttttattttttcatttggtgatggcaatatattattactattactattactaaacagttgatttcacagactggctttcagtaaacaagtgggtgaagtggtttgatacattggatatactatacactctgcaagtttatctctttctccttttatttactctatcactgtcattctctccttaagttacagtctttggctggtttgattgtttaattagacggtttaaccccccttcctctttctcccatttaaagagccatgctggatcttttcaaaaatataatatcaaggaaaattagagataaagaaggttctgaattgatatcttccgattcatcatctatcaatgagactaataatgaaataacttcaattagtaactctacttcaaatggtgaacaaaataaatcttcaattaaagtactattagaaattcatccggaacttgcggaatattactctgaattacatgaaagatatttactctctgataaaattggtgatggtgcattctcagtagtttataaagcttacgattcaaaggagaatagatatttagcaattaaaattattaataaattatcaatgaaacctgatcaaattgcttcaattttaaaggaaattgcaattatgagacaacttaatcatccaaatattgttaaattatataattatcaaaattcaaatgattctaaatattgtttcctattcctggaatatatcgcaggtggagaaatatttaatcaaatcattaaatatacttattttagtgaaaatttatcaagacatatcttaagacaagtggcattttctgttaaatatttacatgataatggaattgttcatcgtgatattaaacctgaaaatttattatttgaaccttcaactttaattccaagatcaaatgatgaacaattattagctcgtagaaaatcagatgatgataataaagttgatgaaggtaaattcacaattaataatggatctggtggtataggtattgttaaattagcagattttggattatcaactcaattacaaaattcattagctagaaccccatgtggtacagttggttatacatctcctgaacaacatatgaatgttggttatgataaaaaagttgatatgtgggcattaggttgtgtcttatatacaatggttgtaggtttcccaccattttattcaaatactcaagatactaatgatattaatgaaaaagttattaatggtaaatatcaatttcttaaaccttggtttgatgaagtttcaaatgaatgtaaatgtttaatttcaaatttattaacagttgatcctcaaaaaagatattcaattgaacaattattatctgatccttggttaaatattggttatgaagatgataatacaattcaaaaaatgatgaaatcttcaaatcctgctgatgatataccaaagacaacttttgatgatggtttatttaaaacttttagtgaagatttaattaatactgataatgttggagattatttttcaggtcataatataacttgtgatgatggtactttattaactccaagagctgaagctatcaaactggtttttgatacggcaggctcaatgatgatatcaccaaatgataataataataataataataataataataataatagagttatagatattgttaaacttgaaaaaccaactaaagttttatcaagtactgatagtataagtgatttagattcagatgcttcaattgaattcaatgctccagaaaatatcgttacaggtaatttagaagatgatgacgacgacgacgatgatgatgaggaggacgaggaggacgatgacgacgacttatcgttagattctgaggatgatactgatgattatccaataacattaacaacattatctaaaaccaaaagtccaatgattcgtcggcatttggtcgaatcatcaacttcatcatgtttatcaccagttcatagtcatgcaacaactgctactttaacaactcaaagtacacaaaaatcaccatcattaaaatcattcaaatcaactaaatccatcaaatcatttaaatcaattgatgaaaaacctacaaagaaaattgcatttattgttagtgataatgatagtaaaagaagtggtagtatatcatcagatttatcaaatttaagtttgagtagtggtatgagtactaattctggtatcatcagatatgattattcaaatgctgttcatgattataattatgataataacgataccaataatactacaataaatgattatgataatcatggtgataaaactccaattgttagtgaaagttcaattaaacataaagaatttagatcacgttgtcaaacacataccccatacgttttcaagggagagaatgaagatgttgaaattgatttaaataaattagcaaatttaaatatgaatccatctgaatcacttgaagataaattgcaacaacatagtgttgttcaattacaattgaattctgcaacaattttaagtcgtcgtaataaacaacgtggaaatgaagttgcttagagtttaatatattatttttattattacatttccattattacattttctattaatttattcttacacttccatttgttatattaccttaacattttctctcttctcttctctgtcttttactttacttacttttacttttaggtttcttttctttcttctcttcacccattgtcattcctttcttacttttttgtctattatagacacaatctctcatacttagcatacacatgatacatacacacattataaatttatataatttttttatagcattatagcatttgtattttttaaaccttcctccttcatggattatataaaacataatcatctatattaactgaattattattaacaagtttagcattttccttatcatttgaattatatctttctaatccttgttcaaatgaagaaaccagtcctacatttcaaatgacgattagcaactctaaatgacattttctcatcatcaccaccattaacacgtataactaaacattgtggtgatgtattcactatcttctttattatttttgaaaaacttaacattttcgggtatttgattccatggatctttatcaagcattaaataaagaccttctaatataacaattttagtatttgaattaattaaaacaccgggattaattggatcaccaactgaatgatcaaattgtggtactgataaaaatttccaagtttttcttaaacagtaattcaactaatttaactacattatcaccatcaaatgattcaggacatccacgtcttgatattaaattctgtggtaataattttaatggtaaatgaaatccgtccattggtacatgtacggcattgagaaattcgtgtggggtatttagttgtttattagacttgtatattccaattgatgtctttgaaccacctttaccagtaatatattcatcaggtgttatcccggacggtatttccgaagtaatattagcattttcattcatcattatcattattaagcatattcaccagtcgttcggcagatgtagttttaccactaccaggcggtccatataataatactattattctttcatttgattcaatgcccttcgttttagaatatttgccaattcatcaactgatactgtccatgtcttattttttgagcaattgagtgaaagtatagaggtattaaaacaagaaaaccacactcaaacatcgataagaagcattacgagaaattgtcatgagatcaaattcaaaacttttcaattactcatatctccctcattgccgcacgaccttgttctttacgcaacactggcctccgaagagtatagtgtatagtagaggtgataacagagagtatataatggattctattattatatatacataagtatgtggttagattataaagtaaattaaagtaactaactaattaatagatcaaacacgagagactttccataatcttacacgaccaacagtcattagcagttgcaagataaccacctgaaggtgcccaagcaagatgttgatacacgacccaatggagttctagcagtcggccaattaggaacaactttcccacttttaactctaatcaatcgaagtgcatctcttgttgtacgacttgcaacacataaaatactattatcaggtgaaaattcaatacttgaaattgaagttgttaaaactccaattgcacgaatcaattcctttgttgatttattataaatatgaacataacctgaattacaaccaactgcaatatatttaccatcatttgaaacccttattgttgttaatccaactattgaaccatcagtccatttatttattaatttaccaccaccatttgcacctgcagtaaattcccatatttcaccattacttgtaccaataattaatatattattatttaagaaacaaagatctgaaactataccttcagctttaactgcatgaatccatctaccagtttcaatatccattaaatgaacccaaccacttgaaccaacaactgctaataattcaccatttgatgaaacaacaaatttttcaaatgatttttgtctattttcaccagaataaagtcttgtaattttttcaacagcaccaccttcaactgaccatttcatcatatattttctacgaccacctgataaaacaaatgttttaccattattattttgaacaaatgatgcactattaacaggtgactgtcgcatatgtaatgatgtaatcatttcattttgacgtccatcaatatgaaatacacgtaatgtacgatctaatccaccaactaataataatggttgtgttggatggaaacttaatgcatgaactggtaccatgtgatacacgtttaatatttgcatcaattaatctttcaactgatatttcaccatttccaccttcctctggtgcataacttctattttgtgataaaaattctttcaatggattagatgaattagtgacaattgaatgtgaggcactaccaattttatcaaataaattggtataattaccttcattattttcatcatcagaatttaattcaatatcttcttcatatttatgtgcagcccattctggtgctgggaatatggaattgtattgtttttgtaatctaccaatatattcattacctgcaattaatctttcctcttcttgttgacgtaatttacgtgttcgatcaactgatgaaatatcaatatttaatctctcatcatctgaatccttcccatgcatcctcatcagattcatcatcatcattagtcatcatgaatcatcatgaatcaacatccattttattttcatcatcaacttcttcaccttcagaatcattgaaaaataattgatcagtcatctaattgaccaatttcactttcattatctgaatcatccttctcactatcaaatccatattcctggttacccatagaatctaagaattcatccctatcagaatcagattgaaattctaaaccttcatcatcactttcttcatcatcactatttaaatgttcaacatttcttagatttgatgcaaacccttcaacatcaccgaaaaccaattttgctaaatatttttcttcagcatcgggcaatttaacctcgacctgtttattattaatagtgacagtctccattactcctagttctaacactattattcagcaaaagacactttcagatggtgtaagaagtgaaaaatctgaaaaaaattaaaatttttttttccactatatgaaattcccaatgtggcagtgaggaaaatcagctttttcaatttactgcatgattattatcgtttgaatactggtggtttattgtattaaagtagagtttcctgcacttcttttcacaactaaatggctaattactacgatcctcacacataccgtatgtcacctgcactattgcgtgcacgtcaaccttattttgttagaaatatgattggtttggccgtacttattgcagttcctgtctcaatttacacatatacttacagattccttaatcaagatgatttcgatgatatcccaattccaccccttgatgatgctactattaagaaattacaagcggaatatgaacacgaaaagggtaaaaactagttatgttggttatatttattattatataatagtcttgtcttgtctatagtgtatttatttttatgtttatcaaagaaagaaaaaattaattaaattaaaggttataattacttctatattgttaatactccataactttattggcaatatcataaaatatctttttcaaaactaatctacttctctcaacatattccgtattcaataatggtgtgattttaaccctattatcaggtgcaaattcatataattcatcaaagaattcaacaagttgttcatcttgaataacttttaatccatccttcatattatcatattgtaaatcacaccattgttgttgaactgtcagttccggaattgtatgtttatttgaccaaactcctgacgctgcaactgcattagcttcagatgttaaaaatagtaatgtattatgtgcaattcctgaaaatgcaagtgttgcatctgtcatggaaaatgtgtgcatgtagatattattaaactttaaatgtgcataattattgttatctttcttacctgatacaatattaatgtaattcttcccatcattttctggaatatctagaaatggaaatgaaagatgatatccagttgcaaatattatattattaaaatcatcaactattaatccatcctcaaattcaacacttttaccatcattaattatagctttaatcctagcacatttaacatatccaatattggaatcgtttaaaatatcattcatccatttacctggaactagtttatcatcggttacaggattaggtggttcaactgttgatttattcgttgataagtaaacttccttacatgctggaattaaatattgtaagatatcaattgcacttatacttgaaccaaccaataatacttttttaccactaaaatctttggcatttctaaaagactttgtatgaatcagtgcattcgatgaattatcacctttgaaagatttcaaatttgatatctttggaataaaaggaatgttgaatctcccagttgataccataactgcatcaaacacttcaatctttataccaccatctttatctaatacatgaatagtccatttactagtactttcatccttgtagattttctctactgaggaattgaatctaatatgtttcttcaattcattcacatcacaaaatttttccaggtattccaaaacttgttcatgtttgataaatgggtaatatgggttcatctcaacattcgtatcacttaactcgatatcctgtgccgatgaaaacttcattgatccttcgggaacatttgtaaataaatgattataaatgcctgatttatcccacatattctttgaaatcttcattgattgacggaactgatatggtttattatattcttcgatatcatatggaaacggtggatcacaggcttcactgtatctccatgttccaccaatatctgaaccttgttcaaataatattatctcatcaaatgcacattttgttggaagtttcttattctctaaactgttataactatttatagttgatgaaccattttttgaagtatgtaaaaactcatttaatgcaaccaacccacttggccctgcgcctataactgctattcttttaatgaccatttattgttagggctagcaagaaatcggaaaagagagaacttgttatcaatatcactctttaatttgtataccatgacatgtcgggatttccttattgggtttttccataaattgttcaaatacttgaagtcataccccacggaatcattttgtatttacaagtacgttgtattataggtgtatatatgatagttgcattatgatactaaaatgataaatcgatctacttttaattgtttattaacatgaaattttcattttcattgatttcaaaaattgaaaaagtttccttttacggaactgaaaactctttcttttagacaacatgactctctgtgatgtgtgtacagctaaggaatccaaatacacctgtccaaagtgtaaatggaagtactgttcattagtttgttttaaagatttcaaacataaagaacatgatgaagaaattttatcacagaaggaagaacatgtaaatgaagaaaaaattattaaggaagaagtcaaacctacagctgaagatgatggttctgatccaatgatgactgaacttttgaagaatgaacaatttcaagactatatctcatcacctgtattgcagttccatattcttagtgtaatagaaatcatcaacaatataggactaacgaatgaatattcaaaggaaggaaggttagaaatcgccagtaggaaactaaataacttaagagaaggtggtttggaagaaaatgagtttgttgaggagtttgtacaatggttattacaatggttagaaacatatagagagaataataaataaatacattaataaatattactactataattgaaacttgtactttggaacacctttgatgtttaaacctgaaacatcaatcttatacaaagcagcacccaaatcatcatcatttggttcatcatcaggtgttaaacttgcagttgtaacatataaagtattaaaatctttaccaccgaatatacaacaagtaacatttttacttggaaaaatccattccatatcaatcttaccatctggtgtgaaacgaacaactttgttactaccccatagacaaacatataagttaccatctgcatcaatacatgaaccatcaggtgtaccattgttaacaaaccatggttcctttgaattaatatcaacttcattagtttcaacattatatttatatctataaattgtaccatctgtagaatctgtccaatacatcaaacctctctttatatcccaattaataccatttggaataccacaatcattccataattcaattaatgaattggaatctttatttgttaatttccacattgatccaaatttaccagtttcttcataatccatagtacctatccaataagatccatctggtgcaattgaaccatcatttgatcttaattgtaatccattaacgatattatcattaggatatttagcaattgatgtaattgaacctgagtttaaatcaagaactgaaatacccctttcaataccacaaattaacttattaacatcagaagttaatccaataacaccaattgatttatctacaacataagtttgaggaattggtaatggtttatcagtatttgaaagcattgaagattccggaatagtgaataccgttccagttggaatatcgatataatataaagaatctgttctttcatcgtatgtaacaccttctaataatgatccatgtggtaccacatggctattttccactttaaatgtagacatagtgattgaagaaaacaaagggaagaaaaaggagatcagtttaagcttggagattcaaagtaatatacaagatacatcaaattcgcataccaactataaacttacatgcatgaaagtccttcttctgaatatggatcaatacgatatttcattgacgcaagtacatgcaccattagttgtcatccagggtatctccaagacactacgtccggcaatatccaataatgaaaataaaaattcaactgattcatcattatatgggttagaaattacaattgaacgtcaacttgatgatattcaatcaatttatgttgaaagatttgtcaaaatattacaacaatataataatagagacaagtattggtggtctggtagtaatggtagtaatacaatatctaatggaatgtggtttaatattaaatatgttgaacaaaattgtcaaattgttgttaatggatcaggatcacaattatcaccatataattcaaatagtcaatattatggatcgttattaccattagaatggataaaaaaatatgttgagtatttaccaagtgttttcattacagtatatgagattaagaaagatgataaattagatgcattaatgattgatgaaattagtaggattaaatcaagatttaaaaatagtaatattgaatatattgttttattaataaaacaagaaagtattgataaattagatgaattacgtatgagtgaattaatttctaaaattacaagtggtggtaaaacttcgttgtatataatgaatgaaggtaatgatgaagattcaattagggaacaaaatattttttgtaagaaattattatttaaaataagaaaatattctaatgatttctttgatttaaagataaataaattaaaggagaaaccaattaaagatgatcaatatttggagaactttttcaagactagaaatttaattaaaatgacattatttgaacaatttaaaaacattaatgattattcaacaaaattattagaatattcatatgataaattattatcaattttaaaatcacttgatgaatcgtcgtacccattgccatatagacaaatttgtcaatggttagatataatttgtttgcacattgttcgtgcatgtattaaattacatgattataatgtttcatatcgtaaatttatgtttcatttagaaaaattaccattaattaataatagaattttcaatactacatggatatctaatcaatataaatggtttggagaattgattaaatattcaaatgatgaaaatttgattattgaaggtccaatgttatcaagtaataatcctatattaaagggtaaaaatattgttaaaaattcaattattttcaatagttttaatttaccacagaatggatttattttcttagaagcttttcaatatagaaaacttgcggaaatgaagggagaggcgacaattaatgataagaaaacattactcaattggtcattagattcatttaataaggctaaagatgggaaatttaatagaattgaatcgtttatttacataatgttgggtgatttatattatagtgaaaaaaattatagtatggcagttaataattataattccgttttgtcaatttatagacttgagaaatggaaattattaattagagaaattttaataaagatattaaaatgttatattgaactttcaagagttaatgaagctaagaaggtgttcatcgaattaatttgtgtttatgataatgatgatgaaaagtttaaagagtttctaaaagaatcaagggataaaatagatagtttggaattaattgaagatgattcacaatcaattatagtgaaagatgcaggtgatgttgatgatgaagatgatgaacgtgaagtatttataaaagaaaagatatttaatgttgatgcagttgtcaaaaaataccagaacttaatgaaagatggagttgatgttcaagtggttattgaaaaacttagtaaagttgaagagttagaaattactaaattagaagttgatattggtaaaattggtaatgaagaagtcgatatcaaaaaagttatcaataacaaagatgatcattatatattcaataaaggacgagtgattgttactatgaatataccatttaaacaaattggtaaattttacatatcacatattaaaataaacggaattgtcaatagtattaaatttaatacaaatactaatatagatgtaagtaaatatgagagatatgttacatggtatgatgaaaatggtcaaaatgagagtatactttgtcataatccacgtaatgaatttaggataataccaagaatacctaaaattaaagttgtgctaaaatacgataatgttacatataatgggcgtaattgtcctattgatatattatttgagaatgaagatgttaatgagggagaagatgttgaaattgatgttatagggtatgctatgattagagataagaaattttctattgagtgtgatcaaagtgatgatgaggaggataaggttttgaaaattggttgtaagaagttaatgaattggaatgtaaagataccacaaatacgtaatcttaaacgagatattaataagagtgaagaatgttatattaactttgaaataagttataaacttattaatgaattcaatgtacgtgtttcatactgaaagagaggcaagaataaaatattggaaatgttggattggaagtagtgaaatacgtgttgaaaatattaataaagatggtaatttacaggataagagagtttggaatattaaaagtagtgttaagaatttaacatttgaagatttacatattaagaatttacgatttaaagttaaaggaagtaaagaagttgaagtagtgattcattgtgatgatgaaaagggtaaacttgaagaatttaaagaatttaaagttgaagagagtaaaattattgaatctaaacttgaagttaagtcaattaatggatttattggagaggtaccaatattagttgaatgtaatataatttatgaggatattaaaggtaatgaagaaatttatattgcagaagttttcaatggtataataagaataggtgaaccaagagttatagttgatttaattgataataatgaagaaattgttaaaattttatataaagttgaaaatcctagtgaaaatacaattatttgtcaaacaaatcattcaaaaattgatggtatgatgatgaatgaatatattaagaatggtacatttaaggttaattcaggtaaatattttaatattcaacaagaatataatatttctaaatgtattgttaaaattgatattagattaccagaatttgcaatttatgataaaattaatggtattttaatgagaatttggagttgtaataataagcttaaaattgaagatggtagaattgttaaatttcaaaatatataaaaagctaactatatagatttatttaattaattaatttttaataattcaacatcaaagattaaagttgacattggtgggattaaacctgggaaacctctattaccataagccattaaaggtggaactgtaagacgagctttttcacctaatgataatttagcaaaaccttgttcccaaccttgaataaccataccttgaccaatagtaaattgaaatggtttatttctatcaattgatgaatcgaattttctaccatttgttaaagtaccagtataatgaactgttaataaatcaccattttttggataagttttaccatcacctggagtaatgatttcaatttgtaattcagttggagcagcagttgacattgaacggtagataggtcttgtaattgatgatctaattaaaggtctaaaagcagataacatgtttaataaatgaaagaaatggtgatgttgggaaaaaaggtggagttgagaaaagtaaggggaagggcgaattgaaaagaggtcttttaataataagaggttctttcttttattagacaatgactaatatacatccaagatacagggcatcacatgtctttaatcacgaatcatgtagtagagatgcaatgagtattgaaatctttttagattataattgtccatattctggtaaaatgtttaaaaagattattgaagaagtaattccacaattaattaaaattgatggtaatataaacaattatgaatttacatttgttaatgttattcaaccatggcatggaattcaaagtagtattttacatgatgtatcatttgcaattagtagagtaattccaaaggcattttatcctataagtaagatattatttgataatattgagaaattttatgatagtgaagtaattgataaaagtcgtaatgaaattgttgaagaaattttacaattaataccaggggaaataatttcaagtgatggaattaaacaaattaaagatttactttcattacaaggtaatggtaatataggtaatggagtttcaattgataataaatattttacaagatattcacgtacactaggtattcatatgaccccaacagttgttgttaatggtataattcaatcacaaattgagagtagtacagaaagtcataagattattgaaatattgaaaaatttataaaatcactataatataagtcttataattaaattaataaagtttcaattttatccttaacaccataaatttggtttttaatagttgaagcatcattagttgtaattgaagcagcaatgacaggtcttgaaacaccacaagctctaccaagtgcagctttagatggaacgaaaacgtaaggaacatttttatcttcacaaagtaaaggtaaatgtaataaaatttcaattggttcagtatcagcagccataataataaattcagaaatacctctattaagagtctttgttgtttcatttgcacctttctttaattgtcttaaattttgagcttgttgaactaaatctaaaatttgttgagataaagcagaatctgctaatgggaaagcttttggattaacagcggacattgtagtattattaagttatttagcaaaaatatagattatatgaaagttccttgctattgctcgccttaaagaaagaagtaaatgaaagtaaagtaaatgaaagtaaaggtgaaaaatttttattttatatctagtatttatattgaaaattactgtgtgatatggtaaaatgagagattttactgtccaatcgactttaaagtaattccccttattttttgtgaataactacagttatctcctgatatattcatattgttgtctttatagttgtttagttcctttactttatccaagaacaattaacctttattacattttacatacattatattacataatattttaaacaattttgaagtagcatattcggaggaataggacgtcattattataaaaaatattttttataagttaatcaagcacttttagatgctattacacaagcagttactgaaagcttagtcccaattcaaacttcaatcgaagaatttaaaggaagattagatgcaattgaaaagaaaagattcagagaacttcaggttgatgaagatgatgatagagtccatgttgctatcgaaaatgtcacagaagtatctacatcttctcaagatgaaacaaagatctctgaagataaggtcaataccgaacactttagaaaatctcaatatttagaaaagtattttactgaaaaggttgaatatcttgataaattcatgcatttcaataccatcaggtactagcatgctgtacacaaacaatatagtactccaatgattaatacaaccaagatgatttttcaagatagtagagaagcaaatgctaaacctaaaaatccattattttatgagaaattaagagaaattaatgaaagagagaatggaaaagtagttaacgaagataataatgataacaatgagcaattagccaatagtactgagatattaatgaatgaaagagatattgcaaattgtcaaaaaccacaatatcaatatggtacaagatttttcaacaataacaaaactaatggtaatccagtcaatttagagaattatttccttaaggcagcattaaatattgataaaaggcccaaacaagatttatacaagaaatcaaatgaagttaaaaagaatttgttaatgatgcaagaacgtcaaccaattgttgaaataaatcgtgtaaataaaccaacatttacaaggtcaacaactagatttcaagatttagaatggttaaaggacgatagagatgattatttaaataatttagaatccaccaaaattttcaaagaatatcaaaatattatagcagaacgtaaaaagatgcaacaattatttcatttatctaaattaaaggaacatggattaggtatacgaccattaaaggaagaacagaatagggaaattgaattaatttggttagatcaacctgaaggtacattaattaataaatatcgtattaatataacatcaagagatttatttacattaagtgatagacattggttaaatgataatataattgatttttatttacaattagttaaagattatgttatggaaaagaaaattaacaaggtacatgtattcagtacttatttttatactacattaaaatccaaggggctaagagagccaaagttgatgttaatgaaatggattatatatttgtaccagttaatttaaatcaaagtcattggacattagcagttattgataatcttaataagaattttacatacgttgattcattatttggagatggtactgatatattatatttattaaaggaatatatggagaatgagactaaaaagaataatggaggtgaattaccaattattaattttgatatttataatatcaacggtaattatgaatgtccgacacaacaaaatggttatgactgtggggtatttacatgtacagcagttgattttattgctagaaatagagaattagattattcacaggctgatatgtcattattacgtcgtagaatggcttatgagatattacacggtgaactgttaaatcattaatataacataaaatataagccacctataatgaccgtaaatctgtaatttgtatataatagaagtgatgagttttttatttattgttctcaaaatttttttatgtgggctgacgctatgctgtaatttgaacctcagtcttggtatttaaatataaactgataaaacatcaatatgattgaataggtgtaagacactaatatgagcaaattaataataataataattgacaatgaacggcccaccaactgatgcactttcatatattttatcattaccaagaatttcaattaaaagagttgtacaaaaatggaatgttgttttagatattcaacaaacagttcgatatgagatttacaatgaagaaggagtacaaatcggtatgatgcttgaacgtagtacaggtaaatttgctgcaattggtagacaagttgagaaaactaagagaccattttgtattgatttaattgatatgcaaggtaatatattattaagtgtaacaagaccatttaaagttattagatcacattgtaaaattttaattccatataatggtaatggtaatggaatgtattattttacagagaatagatggaaaaataataagagagaagttgaaagtattgaaattggtgaatgtaatgagaaatggacagtatttaataagaaatatgaattatttgagaatggtagattatttggtaagattaagagtgaatacctttcatgggaattcccaatatttgatgtaaatgatggtagtaaatgtgcacaagttactagaaagatgagtaattggcaagtacagatgttttcagatggtggtgtttacagtttagaatttaatcctaatggtagtcataatttagatttaaataagagaggtgttgtgctatcaactgttgtagccattgactttgaccagttcagcttgcacagtaaggatgagagtggatttgacaatagttatctttataatagagtgttccctttcgcgggtccttagtttatttcactttttcctaggtataatacgtggattacgtaataattttactgaaaaattgttcaaaaaaacacgaaaaatggtcaaaattagtaatgttaatattaatgatgtttaacaacaattttaaaacatatcgagtatcttttctatatatagagacttccctctttccaatgagattatttagaagtatccaagtattgtagatctcccacggaaattgattgaaattttgtatggtgtaaactttgaacgttcataactaaatcaattttcaatattttaacaaactaacaacacagatgttcgattcaggcaattctctatctacatgtctaacgtgagtctatgtggagctctaacaaataagaaaaaaatttagaaaatcacgtttccgagcgttaggaagtattatacttaggataggatataggatattttaaacaattttgaagtagcatattcggaggaataggacgtcattcttataaaagggtcgatgcgtctgtgtgttacgtaataattataatttgcgtcggtgcgactgtggtgtagattactttagagtcgatgcgactgtacataatatactgtaaatgggaattaaaaaatggctgcttctactattctgttaatttacacagactttaaggtattattatactgtaattgacaatttaagataaaagagattgattttatctttattttattattttatcttttgtatctttcctttcaataaagtcaattactcttactcatataatgtcatcagatctttgtcctgtttatgctcctttctttggttcacttggttgtgcagctgcaattattttcacttgttttggtgcttcttatggtactgcaaaatcaggtgtaggtatttgtgcaacatgtgttttaagacctgatttattaattaaaaatactgttcctgttattatggcaggtattattgcaatttatggtttagttgtctctgttttaatttcttcttcattaaagcaacaacaagctttatatactggttttattcaattaggtgcaggtttatcagttggtttagcaggtttagctgcaggttttgcaattggtattgttggtgatgcaggtgttagaggtaccgctcaacaaccaagattattcgttggtatgattcttatccttattttcgctgaagttttaggtctttatggtttaattgttgcattattaatgaattcaagagcaactcaagatgttatttgttaaataaattaaaaaaaaaaaattaaataatcctatttatatacttattatatacattatccattaaaatttcatcttgttcattaacaaatatttcaccctctttattataatgttcaaaattttcaaatctaattaaatctttacgtgttataataccaactaatttaccttcttcattaatataaacatttttactaccaatttcagtgaaaatttcaaatatcatatatgcacttgaatttatatctaattctaaaaattcagtttcaattaattccccatatttattatcttcactaaaattaataaatttcctctcaattaatccaatttcatcaccttcaacattattatcattatcaccttgaatatcattcaatatcttttcaataatttctctctttaaaactcccatcatattctttctaccttcaaccacaggatattctcccttatcatattttaatacttttaataaatcattactccacataccttcataatcaatacaaattacctgtggaaccattaattctctaactttaatattcaatctgtgttcctcatttaaatcaataaatggcataccattaaatttaatcatttgatctgcaattccaccaaatccattaccgaaaatttcagttataattttaactgttaaaattgtaatcatacatggtataatatatttaactgcaccagttaattcaatcattataacaacaattgtaaatgttaatccagttataccacttaatgctgcacctgcacctaaaaatgaataaatacctgaattaatattaccaccacaatttttaactaatatacctaataatttcccaaatgtacatccaattgtcatacttggtacaaatataccacatggtactttactaccataactaattataactaataaaattctaataattgttgcaaaaattaattggaaaacaattaataaccattgattttcataatttatacaaatttcattattttcatctccttctttattacatggattaaataaaatttccattactttagtcatttctaaacgtaaaaatggattccaatatccaataattgaagtaattaaacataatattaaaatttctttaattggattcccatttaaatatttttgtctaaatgaaacatatttaatattatatttaattgtaataattccataaattccaccgaaaattccaataattataaaccaaaaaatttctaaccatgaccaatcaatattataactaactgaaaacattacaatttgaccagttttcaatggattccataattttaatgtagaaactgcaattaatgatgtataaaaagttttccataatgtagttaatttaactttcccactaatttcctctatactaaataaaacaccacctatgggactaccaaatgcaactgcaactcctgtacctgcacttgaaattataatatcacttaattgtattggactttcccttatccaactaattatattctttccaataatattaccaatacatgaagcataatgaacacttggaccttctttaccaacagataatccagatgcaattgttaatggtaatgtaaatgcctttaataagaatactttcatagataaaaatttatccctccaaaaacctgatacaatacatttaatttcacttatacctgaacctgttgataatggttcaattgaaatacataaataggatgctaataatccgaaaaatgttgatattattgtaaatattaagaaattaattattgaataatttgaccaattataccaatcattattaggacatgttgattcagttaaataaatatttgataaacaaatacctaatttaattgaattgaaaaattccgttaatatagtaacaattgcagcaattgaacctattattatacctactatcgttagaacaaaccatatttgaaatgttgaccaaatacgtgattgtataagctttagggttgatatatgaaatgttgaaattgttgttataatagaatcttgagttgaaggtctagagaatgttaatgaaggttttgattttaattcattataatatttcttattttctaataatttttcattcctccaatcgattgttttataagaatcgaaatttcttgataatttttgaatttgtggatctgaattatatgaatgttgccacattattgaaagaaggtgaaggaaaaatgtgtagttaaaataaaataacaacttttaaaaatctcacaaattagatataatggatacttaattattattattattaaaaatgataatatactaatattatattgtatataaagaataaataaaatgacaaacaaatatggatatgatataattataaataagaaatattataaaacacttaaccaacgactaaagtttcttcatcagcaaattcatattgaggaatttctaaattaagtggagctggaccttttctaattctacctgaaatatcataatgagaaccatgacaaggacaaaaccaaccaccaaaatcacctgcttcaccaattggaacacaacctaaatgagtacaaattcctaacataattaaccattcaggatttttaactctatcagaatcattttgaggatctcttaaagttgaaatatcaatatcatttgcttcatcaatttcatgtgaagttctatgtctaataaagactggtttaccttgccatttaacgacaacatttttacctaatggaattgcatttaatttaacttcaacttttgccattgctaaaacatcagcagaagctgacattgtacttaaaaatgcttcaacagttgatttagcagctgctgcacctaataaaccataagatcctaccataaaatatgtaaaatcttttgatttattatttgcacctttagaactatttaaataatgtttaaaatctggtgaatcatatgttgattttaataatggtaaatttgatgaaaataatcttttagaattattatttaatgaacgtaatgcagatgaacgaattggtgaaatcattgttagttggtaaaggagagattaagggaggtataaaatacaggattaaaataggggttaaaatctagtaaaatctaaagtaaattcaaataatcaaataatcaaataataatcatattataatttttccagcaagagaggtccacttgaatgaaatttattgtataattataatgtgcttatttctcattggttgagtgagggtaaggattattattatatgcttatgtaatcagtgggtgtattatgtaatcagtgtaatgttattattctcactgattattattattttggtggtgtaccaatgttgcttatgtcatacattatttatgattaagtaagccgattaagttatcaaacaactcagccgcatattgtttcttttcagcaaagtggcggtgtatgatagcagaatgattgttaatggttacttcctcttgtttctctaatctatcaatgcaagctttctttatatctggaagaggtatatctggagcaacattaatactaggaattgtattcaacagcatatcacttatttgttcaaaatcaattatgttaatattatttttattattattagtagtagtagtattattattattattattattgttgttgttattgttattattattgttattattaactgcatttttattagctgtatttttattagctgcatttttattagccatgtcagccttacttggtctacctcttttacctttactttttggcggctcggctgttttttcctcataatcttcatcttcttcattatcatcatcttcttcatcataatcatcatcataatcatcaatatcaatatgaattcttgtttttttttgaagtgtttgtgatatagttgcttgagttgtcttctttttcgaagttgttttagttcttgtaaatttttttgctttaccttttcttttacgagtacgtttcactggtactttaactggaacttgaactggtgcttgaacttgaactggaattggaattgtaactggaagtgtttcaaatgtagtagttgaagtttcaattgtattatttattggtgattcaaaagtattaattactgcatcaaatgttgaagtaatatgtggttcacccattgtattattcattggtgattcaaaagtattaattactgcttcgtatgttgatgtaatatgtggttcaacaattgtattatcgattgttggatcaactatattaagtggattttcagttgtattattaattgctgcttcaattgttgaactagttggtggatatgataattcatttggtttctccctttgtactctaaatgttggtttcttatcaatattagatacatctacaatatctacagattgtttgatcattttgctcttgatttactaataagaagatggtatcgatcgatgagattaatttagataaggagccaccatcgcgtaaataataccatcatcttttttgtttgtttaaatgaaccaatgttgtcgttatagattttaaatttgtatacaggactaacaatttagagtaatgaaataagaaataagaataaaaaaataaaataaaagaaaacaataaaagaacaataaagtatttttttttaatatacttaattatagaaaacaaattttgctttaccactggtaactgaaactgtacaaccatcttgaccattaccattataagaaccattttcataaacacaatcaccaattacaactgatgaatcatcatatgcaacaattttaacattataattagcagcttgtctattatttggatttggaattaatgataaatatgcaataccatttgtataacctgcaccaaaatttaatggagcccaattaccaacacctgaacctgcttcaccccaaacacaaccttcagtttgtgaaacacctgcattattaacataatattgagcagaagttttcaaacctttccaattataataattatcttcatcgacagttgttaataattcttctgaacctgcaccaacaattgttggaataaccatattttcagtacctggataatcagttctacaaattgcaactgattgatcaatttcactaacaactctagccatatcaacaccccattcacataaataatttgaattttgattagttttataaagataaccatttttacaatataaaccaccaactgaaacaccatttgcaggttgatttgaaggccattgagttttagacataccaggttgacaagcataagaacaataagtaccatcttcacatgaaccaccagttgaagtatcatcatgataaagacctgaccaaccaccaaagcctaaataatcaagtgcaacaacaccatcaccacttgggaattgagaacatggaacaacaccatcttgaaattcatttgttggtgcttgataagcacctaaactacctgatgattgataagtataagatttctttgaagctgatgtagttgtttcttcagatgatgatgaggaagatgaagaggtagaatcatcttcagttgttgaagatgaagatgaagatgaagattcagtagtagcttcaggagttgaagttggagcagtacttgaagtttcttgttgaatagttgattgagaagttgttgattgttcataagttacaccatcaccatcaacagtaacggtaacataaacataatcataggcaacagctcttttatgttgatgatgcatatgataagtttgagttgttgtacaatcatcatcattgttatcagaagcaactgaaaatgataataatgaagcaagagagagtaaacaagtatttgataatttcatctgtaataataatataatatagttggtattcaatgttagtatttatgatctatattgtatgatgtaataagaataataataataataatagtaataataataataatagtaaatgaaacaaaatcgcgaatttttaaattttttcccatagtaaatagtaaacataagggatatttttagtaagtgagtgagtgagtgagtggattgattttattattattattattattatattatggtattatttgtaaaagcgtgtttgaatgagtgtaaatgaatgataatagtaataatgatataatacttactttaatttataataatgagtgactaagtttagaataatttttttgaatgtaaataatatacagtgtaatttaatttaatttaatatagtaatttttttcaacaaacgattaaggaaagtaaatagttgggataatataatgtaattaaatataatatcgtagttgaattagaatgttgattgattaatttatcaaaaaaggagtgacttagtttagtatgataaatgaagggaataaaataagataagataagatattaaatcaaatcaagaagagacatgagtagttaaatataaatattagcaaatagccaaaaagaaaagaaaagaaaggagaaaattataaaacacccgccacttgaaattgaaaatttaaattgctgtttttctgtcttgcgtcggtgcgtctataatggtgtatgggtcgatgcgtctgtactatatttctaacaattacgtaattacataataaaataataaataacggaaaaagaaattccggggatgcaaacataataatttaatattttctccctaatttctccataatttccctattttctccataatgcttttattatccccttatgagaagtaaagaaattaagaaattgacttcttctcaatatagaattctaattattacaacataacttttttaattttattattttctattttcttttcctctctgtctcctttcattaatcatgtcacaggaagtctttaatgagggtccaacgacttctcaacatatagattcaaaggatgataatcatttccaaaatacaacttttaaattaaagagaacaagatcaatggggttattaataaataataataatcttaataatcttaataataatttaacttcaaatactactactaataatactcataatacaactccttcaaagattaatcatagaattcaaagacataatagaattcaaaataatactaaattaacttcaggtaattatattcctcaagaggcaattaataaattaaatcttaatttaaataataataatattaataataataattcctctaatattaataataataataactcctctaatattactaccaccataccacaaataaattccccacaaagtttccaatcacaattctttgatgataattataattcagaagattcattctcttcacaatcttcaaataattcaaattctgctccaatttgtctcataccgaaacatcaacaaaaaaagaataatattaataataataataataaccttaataataactctaataatacccatatactttcaccaattaatatattacatgatgatactgatgttaaagattctcctgatcaacatgttgattatttaactcataaatggaaagaagatgaaatttcaaaatcttggaaatatgttactttaagaagatcagcagttgcagattctgctagattagaaaatgcaagttggagaacttgggctcaaacaagacttaatttgaaaactatttctcctgaagaattaaattggtcaaaggaaaatgatgttacttggttatatggtcccgttataactcatgataatgaaacaaattttaatgataatgatgaaacttatgaaaaaaatgaaacaacccctaatgataataataatactaatgatgaacatgataatataatatcccctaatgatcatttaaaatcaattttaaagaaaaaatcaaatgttgaaaaagttataagtgaagcaagttatagtaaattacaacatttattagaaaatagggaaaatagagaaaataaggaaaaaaattttaaatttccttcaaattctgtatctgcatcaaattcaataacttcatctccaatgattgatccaacaattactaatgatcctaaattttctccattaatgacaaatactaatttttcagattcaattataataccatctcataatttaatatctccatctcctctaccatctaattcttcatcttatgataatactaataataataccaacagtgatcaatcaaataataaaatattaccatcacgtataaaatcatcattgaaaacaacttcattgttgaataataataataataataataatttaaatactactccattaactaattcaaaacatattcattttaatatgagagttgatcaatgtattgcaatcaatgatagtgatgattataataataaatcagatgatgattatccaattgataaaatggttagttctaaatatcatgaagatcatgaaaataatcatttttattcaaatgatggatttgaaagtgatattgatattgatgataatgaaaatgataatgataattataatggtgatgatgaaaaagattttgatgaaggttttgtattaacaccaactattcatgttaatatatctcataaacctaatgatggtaataataataacaataattctaattctaatgaaagggatattataacaattgctccattacctgcaacaacattaaaatttggttctgatgatgaattggattatccaaatgattataataataataattcaaattataataattataataataataaaatgtatacagtttctcataatacaaagactaatcgtggatatgattattattatgattataatactgtttatagtaataattcaaatccaacgatatacaaaccaacggaaacaataaaagagaaaaataataacaataatatgaatgataatattgacaccactgataatactgatgatgatgatgttgaaatgtatgatgttccagttgatttccaaatgaatgaatcaaatacaagtattaataatttgacaggtttcccagtttattcatataacgatggagtaaatattccatcatcagatccagctccattgaaaagaactgaaagtattgattcaaaaaattcttcgcaatcattatcatcaattaaagttggtttaagtggattagatttatctaaaactggattaaaatcaagtacaggtttaggatctaaacctcaattatttcaattatctcaacaatcatatgatactccatcacaatttatttcaaaacctcaatcattaacaaataatagaaataaatttttatttgatgattctgatgatgattctgatgatttaatgattgatgataataatgattatcaacataatgaaattttaaaatttgttaaatcaggttcttcattatctgaattgaataataaaattacatcaaatcctaccataattaataataataataataataataataataataccaataataatacttttgattttggtagtgatagtgaaagtgacagtgaaagtgattaaaaactaatgatatatatatcgatatttatatagttgattatggaattaactattcttgtataataatagcaatttaaaaaaaaaataattcattactttattcttgtttatatttttcagataatgctttccaaacaccagttaaatgaaatttaattgtgaaaatgtataaaattaaaaatcttgggaaaattgcaacaagtcttggtaatattgaccaagtacctaaataaacatcaacagttgaactccaaccattttcaatttcatcaattgccttaacaacataaattttcggatccattggattattacgttcagacattctttgtcttgtttcaaatgctgccttcatttcatttatattataaatactatcctcaggtaatgatctcttatctgcaatatctgttttaacaccacctgttataaaatttttaactttaacattaaaaggttttaattcaaatgataaaattgatgcatattgaccaattgcacttttacttgcaccataaattgaaccaaatgggaatggacaataacctgctgctgaacctgtaaatgcaattgtaccctttttagcaataactaatcttgaaaatgtatgaactatacgtacaggtccaataaaatttgtattcatacatttaattaatgcatcatctggaacatcaattgcagggaatgtacatgatgaacctgcattattatataaaatatctaaacctgataaatttaattcatttaatttattatttacaaatttataaccttcattaattgaatcaattgatgaaacatccattttaaatgttataattttatttggatataattttgttaattcattcattgattcaagtctacgtgcacatgcaaatacataatatcctctttttgctaattcaagtgctaaatagtatccaatacctgatgaacaaccagtaactaatgcagtcttatcactcatcttccttgtatatacctgaaaaagatgctaattcaattaattcaattaattaaccaaaattgaggaaattaaattaacatgtttttctatcattattcaatatcatcacttcttttctaatttctttctcctttcataaacgcaatgtccaaatatagtaagttagataaaacagataatgttgactttggtccaggattagtagatgttgatcttaatgaatcaattcaagataatgataatgatgatattttcataacacctgatgttcaaacatcatctaataaacaattaccttcaccacctgtatattcatcaacaacaaatgcctctagctctacttctgcacctccaccagtaccacctaaaaaggatgaacagttctttaatttttcatcatttattacaccaggtaattcatttggaatggaaattgagacaagagagagaccatttactggtggtaatacattagatgaatcagttttaactacattacatcgtgatttatcaacaattggtgataaattattatcaattctttggccattaagattacgtcaatcattaatatcagttcaaaaattaagtgatagaataactggtgatagaattataacaaatgataataatattgaagatacaattggatcagattcaaattatatttctggatcacaggatgaatattcaacagagacaatgaaaaaaattagagattgggatttatggggtccattagttattaatttaatgtttagtttaattattacttatttacaaagtaagaaattaaattctaatgataataataatgaaacttcaagtcaaattttcagtgcagcatttacattaatttgggcatcaattgcaattttatcagttaatattcaattattaagtcctgtacaacaaaaattacaaaatggtggtgtaactaatggaattgttggattaagtttttttcaatgtattagtcttttaagttattcaatgttcccaattgttattggtggattaatttcatgttttgttccatataaatttgttaaattaataataaatttaataatgctttgttggtcattattatgtacttggttaattattgcaattttctctaattgtaaaagaaagggtacattaacattaattgcaaatgatgatgatagtgatggtgataagagaattttcttgatggtttatcccgtcttcttagtttatggattattttcttggttttgtgtaattgtttagattatttattcatttaatttatataccgatatatctattcattaggaattgaaaaatactctcttatttcacttttactcataccactaggatttgaatcgtatataaatgaaactaaaatatcaaaattatccatcattatttcaattgaattttccatctctttaattactgataatctagtttccagtttttcaggtgatctttcaattaatttatctatttttttattaatttcattattctctaatgttaactgattaattgtttcaataagtttatttctctcctttttacccaacttcctttcatttttcaatattttaatttcctctttataattatcaattaattttaacatttcctctttcctgattttcaacctttcataatcattatttaatttcattataccagtatattgaaatgaccaataaatatttgatataccacatttttcacaattaactaatccatcatcaactaacattttcaaaatatccttgatttgcattgaactaatacctgttttcttacttgcattactttcaatctctttaatagtatacattgtatgatcattttgaaaccattttaaaagttttgattgctttttcgtcaattgacatacctttcttgggaccctatattctacatgttagtacatcaattacaattacaagacgtctattactactagtctacctaccatattgttgtttagttgtttttattaaagagtatacagtgatctaagaaaagaagtaaagtgtctctatggctgagccatctcatttataaattccagattgaataaactgagccctgagacatgtattgtattaaattgtgtgtgtagttatatagcgtttgccttttctttactctctgttcatgtagtatgctagggagttgttaacaggaccacctagaagagtcactatcttggtatctgagatgttgtacccatttatttgttcagttgtctgtattttgaaaactagttcaagtgttttctggaatactggtttatccttaattttattcatctttagtatcttatttgatactaatatcttgttttcatgtggtaatttgtaactaccaattgcttggtgtaaacaagaaatatattcaatccattgagatgaatttttaaataatttactaacttccaaatgactattagttgataattttaaacttcctgatctgacgtggtatcttaatggatcctcttcaatatctttacataatttcaataaattttcaatgtctaaatattcaggtatttcaattaattgtccatatattgtatttgataatacaaataaagctttcttaactaaggctaatttagaacaaccggcaggatatctaccatgaactgtatcacgaatccagttgggtatctcaggtaagtttttaaatttatgctttaagtaaattatcgatttgaagatgtggtatgtctaatttataaaagataccacgagttgaacaccaatgactgaaagctcttaatgcattatatacatcaactgaagataatgcattttcaccacaattttcactaatgattctacgtaatgcataaccttctaaatttggtgatgcaacattatgatcagtttggaaaaaattaatctttgttgcaactaaaatcattgaacctaagaaaatcaattctgatcttaattctgaatcaatatctgatatataacttaatgcttcgtcctccaatgaaaatatatcataagatgaattttcaattgaacatattttagaactttcatcataccatttattaagttcaatttctcttgatgtgaaaataattgcaagtgaaagtttagaataatcagttaaaattgaaccacagcttttcaaaatatgatatgatgatagaattgaatgattatatttataattttcatatgaatcggagacaattaaatgtttttcttctccttgaacacgtatgaagttaccatcagatgtgagtttatattttttaccgttctttgaatattcattttggtttagtttattcattgttatttgttgatcctgcaggattgcatcacatactgccaccagatttttcgatatatcactcagcattcctactctaattgtcgttgaaatcaattaaatatctttaatgcttgttttgatctggatcagtttcccaaagtggtaataaagctggaaaatggaaaataattagaaaaaaaatatgaaaccgtcgcaattttcgcaatttcgcaattttcgcaatttcgcaattttcgcaaatctcacggaatttccattttttttctttttgtttcttttggaggactattaataacatctaaacatcatatattaatccgttgagaaaaaattggtgtttttctgttcctttcctctgcctctacttagtttcttttcttttgattggaatctgttaagccttggtttgaaacggttttgaactcattttcatttaaacattagaacctattcttaaaattgcatttgctttaaagatttaatttcaagttgattaattagcattattttacacatcatttcgtctagatcaatcatccctttcgtatcaacaaatcatttcaatctatagatttcattaacttcacactttactagattttgcattatattattacattagagtatttacatacataaattatactatttaaaaaaacacatatcataaaaaaaaatgttattcaattttaaatcaaatcaaataatcctacttatttcactcctactcagtgggatcaatgcggcagatggggatacaactacaactcctataactacagttcctcttacaacagctgttgttgctgctgctgctgcaaccactccaaccactacaactactccagctgctgctgctgctgctgcaacaactccaaccactacaactactccagctgctgctgctgctgctgcaacaactccaaccactacaactactccggttgctgctgctgttgcaactactccaactactgcaaccactccaactactgcaaccactccaactactgcaaccactccaactactgcaaccactccaactactgctagaaccactggtactaatacgaataccgctactacaactggcactgcaactggtgctgcaacaactaaaactactaataccagaggtataaagacgactgctgatacaactgccaatgcagcagatcattatgttccaattaaaacaccaaccactactattcaagcaactgcatatacaacagatttaacatcatcaagtgttgataataccattgtttggttgactacaactatcacaaagcaaacatctgaaatcacttcagtttactccgttgcttgggttcaaacatttcactcaaatgtactcaactgttgaatctgcaccttctggtactattggtttaggaactatcaaaggtgaagttggtacaaccagaacttacagagttatacagggttagttttatccatcatagtttactcacttaactttccactcattacgtttatttagattgtcaacttttcacccactataccactatcgtttatatctactttttgtttttttgtgtacaacataattgtttttttcctttataattcctctctaaattgaataatttagttaatacatctcttttaaataaacaggaacgttaaaagtaggaaaaaacggttctcatggatatacatcgatgctatgtgttgggttgttgtcgtctgcaatataatcaatgaatggattttatgaacttctcaatctctcagtgagcacgctactacagcttcacagttatacgtatttgatttaacatggaattacatagtatacatactatattataaacattataccgggtaaaaatttccaactttttttattaatctattttacaaatatcaatcattcatcagcaccgaattccattggatcaaaattacttcttagtatatctctattttcaatttctgatcttgttggttctctaattattaaatctatttcatcatatgaaacttctttaatttttggtaataaatatggatcaattctacatttcttcaattccattctagatgatattggaacataatatgctttatttctcttttcatcaaacttaataactaattgacgtaatggatcaacaggtttttctgaacaatcatattctctttgtttcttatataaaactttcttagattcatcattagtagcttcctctaattcatcatcatcaattggtgcattttctgtttcatcttcaagtttttccttgacatttatagcattggattcatctgttaaataaaatgaaactaattttgttagtcttgtttaattctatctcttttaatatagatgttaataatcttggatcatttattgattttatagcgtccttagatttatcagtgtttttggagatactggcagaactaccaaatctaatatcataaaacttttgatcctaacattgatgtatctggtaagaaattccaaatttttttagcttttaagtgtttctttgttggatgtttaattgttgataaatctacagatgatgcatcaaacatatcttcaatagttttcaattgagattttggatcaaattcattttctctctgtggtttgatatttggtaattttacagtggccgtactagcagaatttgcactactttgaatatctgatgaaatatattgtgttcttctcaaaaatccaacagaatctgatttagtttgaatatgctttgtaggatcagctagaagaagttgatcgcttggatgtaatgtaagtggtgagttatcattggtcactccataaatagtttctttgtctggtaatgaaactaaattcatttgcatacctagatcttcatttaatttgattaaattcttgaagttttcctttctaaagaatgaagaaactatagatttcactccagcatcaagatcagtctcattatcctttaataactttggaggacatgctggtggtggtaaattattagagtatctgactttagcaacatactgaatattggatttatgaccattagcagcatgtttatgattttgtaatgaaggtttgtgggaagatgacatttatgattgtctgtatactccagttattgtcacctctgttgatatctatgagtaaaaactatacaggataaacaacagagaaaaagaacaacttcacactaattcaatttaagctgaagtagtattatttcattgtcgagatttcttcaactgtttatattttcattttcctatactttagttttttatttacactttgttgattttttttttgttatttactaaggcactgtagataaatggaagcttatggatgctagatcaagactaaattctgatgaactcttgttttcaggtgtgacttttactacaactgacctcaattctaaggaaaagagacaaatttccgatgctgtttattcaatgggaggtaaaattaaaaatgatttaacaagtgaaactgatgttttaattgttgggagtgtagacactgctaaatctaaatattgtataaataatagaacagatgtaactttactttatcctgatgatttattggatatttatgttaagttcaaagagagaaaccaataaattgtcaattcaaatactggatgattatccttggcctattttcgattcatcattattttgtttatcaaggttaagagacatggagaatccatgttatgagaaaaactatataagtagacttatacatcattttggtggtaaatatgtggcatcattaacaccaagagtgacatatttgataactgataagagagagggtaaacgttatgaaagtgctttagaatggaagattaatccaatacatcctaaatggattgttgattgttgtaattgtcaaagaatattggatccattgttgtatgatatatcaaaagttaaagatttttcacaaattgggaaaaactctcatacaaaatggagacatgttgttgattatggttcggttgaaaataatccaattttcgatagagttcaaaaggaactgaagaaaattgatgctgctaatcagaatagaagtttgatacgagagccattgttgaaaggatttgtttttgcgtcttatggattccaggaagctcaagtacagaaattaaatcaaatattgaaagataatggagcagaatttcaagatgactatgatttaagtataacacatgttataataccttctagctttacattggagcaggttcctgataagataatcaatttgaaggaaatatcaggtactaagattatcaatgaatggtttattgaaagatgtttacattataaaaaagttatggaagattcttggtcattacctttgaacaatttgtttttagattatagttttaagatacacattacaggatttacagaaattgaacatctacatatcaccaaacttgtcaaaaatttaaatctaaccttgtccaatgaactcactgaaaattgtgattttttaatagccaacttatcttcattaggattaacgaaagataattcaccgccaatctttaattacagatttaatgacatattaacaagtaaagctaatatgacccccgctgctataactttaacgaaaaagaaaataaactctgcaaagaaatgggatattccagttctgagtctagcatttctctgggagttggcccaaactggtattttaccacatataattgattcaagatggtgtgtgtttgcacctaaaagtttaaaacctgcaaataactttcttgaatatgcaagatctgtgtctggtggcacatttcaaacacaggcaaatagaccaaggcatccggaaagtgatgttgtacaagtacagttatctagtcatgatgaagaacaaagtcacatacaatccaactacagatcatcacctacaaagttacctgttcagttaccttctccaagaaaaaacagtacaaaaaaatggccaaaattgataggaactgcttctgaatcacaattgaaatctacaagtactgtcgatgataattatgaatttcgttcagcaagacgcttagtatttgatgaaaatgacaataataataatgaaaaggataaagataaaggtagttttgtagattttgaagataattttggtattgatgatatacccgtattcaaaaaaagaagattttaaaaaaaaattatattattctattcttgtaaaatacacatgtataatttaatgaactacattcaataataattaaaaaatagaagttaatgggtaatggcatcaattggtaaacaaattgtaatgccaggaatttcaaaaagcaaaaaatattgtcaataatgataactgtggggttcgaacccacgcctccgaagagaccaggaccttaacctgacgccttagaccactcggccaagttaccagtatttacccgtgttttttgaaggtggctcaggatgttgcagagtaattttttattttttttttttttttaattgcttttttgacggtttgaatcaatgttttgagtccccttcttgttaatttatactagacagtaattgaacctttttatcaaccacttttttgagccattgacgcaaaaaaaggatagtagaaatttttccattattttaaaaaattagtgaatatgttaaaacgatctataaatttaaattacaaaaaaaatgttacacatttaagaaaatcattcattattttcttcatgattttcttcattagagttttcactaataaaactaacaggttgttcaccatctaactcataatcataagtaaaatgtttccaacgatcatttgaataaggaccgccaagtctactatctttcattattggagcaggtaattttttaacacttgaagctgaatcgctttgttttcttgatgattgtgatatgctatcactacgtttactcttggaatgtgctctactatcaacagtattttcatgaataccagcaatatcatttgacatcgcagctgcctttttggaaatttttgcattagaaagtcgtctttgaatttctttattatcattaccacctccaccaaatgtaaactgtctaaataatttattagcagattttttggcttgattaggtactggagatgatgttgatactgatgatgaagtagaagggtctctcactatctttctttattatcacaggtggaggatgtataatttttgattcaacatcttgtcctaatttatctgcttgatgtgttaatattttacctaaattgaacccttcatcatgattatcattacccttttcaatatcatttggagtgtctctagtgacagttctagaaattgcccttaataatttagcactaactttttctttttctggatcatatggattactaacataatcaccatccacttcatcatcaatattattatcactattatcacctgtgtatatacttatattattatcttcagttaagatattcattattttcattacttgaagccacggaacttcgtgaactttctgaattccttaactattatttcaccatctaccaaattatctaaattattagcaggtgtatcagcatcattttcaggcatatatgcagatgcaattgttctttctctcattaatggttgacccatatcaacaactgggaatacaccctttggagatctaatttgtttacttgaatgtctagaatttcttgatctaattgaagcagcagttgaaactcttgttacatgaggattaagagctgttgaattaactgtattagttcttgatatatcgttttcatcatctggtacaaattcctttactgttaaatcagatgatgacttttgtgattctgataatgatggagcagctgtcggaacacgaacaacacgtgattccatattaagcattggctgttcgtctctttcttcataagctggtaactttaatttcttcatatctttttcaataatatacaggtgcaaataccatggtataacaattccaaaaaatgaaccaccaatcatattaccaattgagccaggtaacataatcttccaaaaataatgaccgaatccgtaaccacaaccagtaaaaatagcagctggaaccataaacatatcagccaccgaatgggtgaaacccatagcaacgaacgtaaaaatagggaagaagatcataagaaatttgacatgtaaaggtttaaccataatttgtaaataaacagcaagacaaacaaaaaagttacctgcaatacccttcaacaaagtttcagcaaatgaataactattcttggaatggccgattgctattgttgcaataacataattttcttgtttgaaaataccagaacagtaacagaaaacatagacaacaaatattgtagctgcaaggttaacccaaaatgaaacaaaccaagaaattattaagtccatcagtgtaacagcaccacgcataacaccaacagagaaaaacaatatattagaattgaacaattccataccacaaacaataacataaaacaaccccaatgcatagactgcaccctgtgttaaataaacaaaaatatacgacccggggattaatgcttgtccaccagcttcacacatcacatacaacataccgcctgcactaaaaagaaatgcacctattatggaatttatacataaaatataaaacggtagtcttgatttcttcattgatgtggccactacagcctaatgctgcttcatgtggtgtgatatagtaagtatcatcaaccatatcataaacttataattcgatattctgtgtgtatttcagttgtgtattttaagataataaataaaaatagataatgttgttcaataaatgtatatgttgaataaattttccaaatattcttggcaattctgtttcgtcaattaatgacctgataatcaattatgagacccctaaatgaagaactaaagcaaaagaatggagaacatgatttaacaaataaatatagaaggaagttatggccaaaaaaggaaatcaaaataaaaaaatctgaaattttgagatccttcacagtttccgctcggaatccctacaaagtccgattggctgattgaatgaatcatcatatatctgaattttagaaaaaatgtacaagtatacacagtaaaaggattacataccaaggagaacactgaacactgtagtgaagatacagttaacagggaaaatccaagtttccggtaataatgtaaaacaacataaactgacaaatggccaaatcatccatgataatttcatgtatttccataaaactttcgaatagttatctatgaaggagtcccaagtaagttcaatattagcattagtagtgaaatcaacactattaagcgattcaatctcccaatcccataaacaaatgaaaagtgaatatagcgtttgaaatattattgttccaattgtttgatctaataaaacacaggctaatttcatatttggaaataaattaacaacaaattcaatccagtaactactcaacaatccattcaaaccaccccaaatcatgaatttcaaatgttctttcaaattttcatcttgaatatggggagattcattattaatctcacttaatactcaaagatggtgttaatttaggtgaaaacaatttatcaacgttacttgtgtttctactatgcatattaccactcttcatttgagaaatattaagattaatattatcactattacttaaacccaatatactattctcttcatcatttgccctatatttactattttgaaatgaacgtgaatttttataacatttatagagtaatatcaacgttttaccaagtaatgaagtttcactacccataacaattggtgttaaaaacttattctttttatcaaaatattgataatgtgaataagttaagaaaatgaaaaataattcaattcctaaaagataatacaatatttcattatgtgaatcaaagaataaacttattgtatcacctaccacttgttctcttattttcattattcaagtaattctctcgttgtttattcagtacttcctgtttttcaatatctctgctattggtattagattcgtcagtaatttttatatcaacaccagcagacttattattatctataacttcataattttctaatccattggtaattaatttgtatggtactcgtatttacctttgtatcaccactagtgttcattaatccaaattacacgtcaaaagaaaacaaattccatcaatcgtgtttacaacaagttggaagatcattatcgaaaaatatagttgttcgatcgtgtgcggcgattcccatcgaattaatttgacttctttactttattgctattatttaattgctatgtgtatcttattcttattataaacaaggtatgaatattttcagtaatgtattaaattaaactaaactatatataaaaacaaaaaacaaaaacaaaaggtaaatacaaaataaattcaaattcaaattcgaaattccttacaaagcataataacaacatcaagttatttgctattaaacaacactttataaactaaaccagccttgtgttttgagggggtataatatctccaattcttattattgactaatggtataaataatacaacatttaatgtatgtgtatctaatcttaatttcttcttcttagtttctagttttttttctttctctactattgacacaatgtagtaatactatattttaataaaacaaattcttatagtttctaaatttttttaattctttatgatctttaacaattctattttttcatctaacaaataccacctttcttagacatccaaattctaatcttgtagattctaaataattctttgactaaatctctaaaatctattctaacttctgaattataataaaatgttaattttttcatatcccattgatattctgcatcaacaatagccatatttaaaccaaattctctaactttatgttgacaaacttcaactgctctcatttcatcttcaattttagaatcaactgttaataattcttcattttgtgctagtcttaaaattggtttagggaaatttaaaattggctttttatgatcatcttcctttgataatgcagcttttctacctaaatattgggcatatcttaataatcttgtttctaaaattgatacatttaatttaacaactttacctaaatctctaccacgatctgcttcaacaattactagatcaccaatttttaaatttggaaaaaattgtaatttatctgattgattaatatagaaaacatcaattcttgaatttttaaaacaacatgcaattatttcataatcatttgatagaactaaatccgatggaattgttaattgtggtaatgatgtattatttaaataacttaaataactttcaatattcaacgattcagcacttggaaagcctaaatatgttgaaacttgggtcataaaatgaactaattgttcattagtaagagcaggagtattaggaatattattcatacccatgccaaaatttattcccataccaagaccaagaccatatgaattatcaagtgaactgtttcttgaatacatgttataactatcactttttctgtaattatttgattggttgtaattatcataattatgattataattgtagttataattatatccattgtttgaaactgaaatatctgatggttttaagttattagtgacaggattattaacatggttattagtgatattaccaaaattcattttcatattattgatattattcaagttatttaaagttttatcatctaaattattccaattaattggattgaggaaatcattaattgtatcacctagaatgtggaacaaaggtagcagcagttgttgcatcatatgaaaatcttctaaaatgtgaattatttttattaatattagcattatcattagtaggagagaaagttgtttcatttggaacagtttttggaggtttaccaaataaatctttattattattccaaatatcatcaaagacagatttagttctaactttaccttcagattctgaacttaaacttgcattattaattgattgagaagtaatttcatcaatatttgagaggaaaccattagaatttgaactatgatgacttaatcttgaaggtgaagcattatgggtatattcatttgagattggtgatgttaaactttcttgagataatggtgggatatttaagtaattttgtaatgaagcatcaatagtattattaatagtattaatagtattaatattattaatattggtattaatatgaattggtaaagttgaattgaaatcagaaaaaatatgcttttgaggagttaatggagaaattaccaccatcaaaaccatctaaaccattagataagtgataacattaaagaagatgatgttaaaggtggttgaatagcatcattaatattaatattagtattaccattagtatataatggttgtttaaaatcaaaagcagttaaaaattgaggtgatttatgatgatcatttgaatgtgataatgaaccaagtttactatttgcatcaaatgaacttctttgatggaaattcatatcagttaaatcattataatttgtattaattgaatcaatacttgatcttttaacagttgaatatttttgagcatttatattagttgcggggaaaggaacgaaagaaccttcagatgataatcttgatctttcatccatttctaaggcagcttgcagagtttcctcttcaaaattattagagaataaaccttttagtttgggtattattgctggtattgttggtatttaaatttggtatatcatcagataatgacatagttagccacagcagcagcagccgctgcaacagaatttgaatttgaatttgtgacaggcgtttcggagttgccggagcctgaattaacaataccgattgaattattattaggattcttattaagcagcatggtgattaagaagaacctagtgtagtataatattaaagcaaatgacttaatatgtcaaaataaaataaaaaatttaaattaatttgatataatataatatgataataatataattttaatctgagatgagccccgatggggaggagaggaaagcaaggaaaccgataaattggaaaacttggaaaaggatggaaccaactgctctttaaatagtcaaaaagtaattacagtacagtacagtatagatagatatgtgtgattgtgtttgatgagtattgatcagattaaacaacagaatatacatagaaagacaagcacagtatataagatgaaatgaatgaatgatggcgaagcaggtacaaaagaaatcgccctccgcaaaacaggaagtcatcacctatggtttggtattacgtaatgatatttattatactgggggctggtcttatcttttatctttatcttaatctttagtttataactactatataacaaaactacccaatcctaccagtattaaattacccagtaggatattattaaagagaatttcgaaatccacttcttctagaatacatatcaataagatgtgtctgtatctcttccttatataccaataataatgccaatacttcaactatactactatcaataaatttatttgtattgacaaaacttttcatcagtttctcatcacaatttgcatctggtttagccatacttgtaaaacttaataatgatggtaaatcaaggtattcaaaatcatttaaattttgtataattctaaattttatagctggtaaacttctcttatcatcattattaccattagtaaaatatccatcattatcctcatcatgtaattcttcatgatccttttcatgataattattatcaactctattaatattaccatcattactatttgtattcgtattcatactacctattttcaccattttcaatttctgatccatcaaatggattctccctactatctatttcaggtgtttgaataaatctattagatgaaagaccaaatttttcatcatttataaatgtaacaagtgattgtaaatcttgtgatgaaatatactggtaaccctgttaaacttgatttaggtacttcatgaggaaatcttgcacttaaatcaaaataattgaatcttcatatctatgacaacgtacttattttgttcaaattttttatcaatttcttcataatcataattatcagttaatttcttataaattgtatcaaaagttcttttaaatccatcaatagaaaattgaaaatcaaattctttactcaatccattgactttaccactaaagtcagttctattattatcatcatcatttggtaacattatatcaaaaataacttccgctttacctgattcaatccaattaagtttggaattttcattatttaagaatgataaatcaagcatatcaattctaattcttgtcatttttttccaaatatcatctccacttccattaccattaccataattatcattatcatctagtctattatcatcgttcattaatttgctattagagttcatctcctatagcaggggtattttcattcatattcatatttttgtttcctttattgtctctataattgtctaattcatttccattatcaatcattaaatcattattttcaattcctttagatattttattgattttatttaaattactattattaaaatcatcactctcatcattaaaatccattccattaaaatgtgcaaatctatgttgtcttttatgtaatgtaaataatgaaccaccaagtgatccaaacatcgaattagcatttaaaaaatcataaaccatccattttcttcttaatctatctaaatcacaattaaagatatctaactctaatggttgattaaaatatttatcattatgaaatgtaatttgtgaatgtttaactttaagatgatttaattcataattatcactaaatgagttatctaataataattcttcaccatctaacatcataatatcaccatttaatccatagatttcaattccttcaattaatcccttaccatctaaccatttactaaatgaaaaagttaaatcaatttcagaaattgttaatttgtattcagaaaatgaatttttcgtaacttgaacttatcatttttattactatgattattatcaactttagaatttaaatttgaataaacttttaaatttcttatcttaatcttaccatcttcccaactagctttaaatcttaggatcattaaaatctacaactaatttattatcaaatgtaattaattttttcaatattctcttctcaatttcacgatctccaatccaattaacaatataaatcaaaaatccgaaaaatgttgtagtaccaattaatatccataaaacagttacccatcaagatccatgacaggaatgctgtaacttcatcaatattgaaaggtctattctgttttaataaaaaatatcttaatttagcacctatacctactggtggcgtattctctttactatgttctttatcaattttattgaaatcttcaccacccggtttattcaactgtgagtaagtttctagtcctgaaatgtgtatggtttaacaccaatagtgttcatcatcaaacctcttttctttaatagatctaatgaattaaaatgatgttctttactaaaattcaccattgccagtcctctttttggataaactgtattcacccttttaaaagatgatattcccaaccggaacagtttcatatttttaaaatatatggcaacatcttcaccatgtaatttattaacctatatgtctaactcagagtgatacctatatttattatataattaatctattcaactaaacaaataaagataaaaaccccttataaaaaacgttttaataatagtttgacactgaaaatttttcaaactccctccctcacttccccaggctttatcaattcagatttctcccatgaaatttcacagtttcccgcccggggtaatcataaaatgattcaactttcattgattattattacagtcatgcttcatcaaggtctttatgtccaatatctgtatccttttcatctttaagtaggaaatctggactctttaaatcaacccatcctaaattaggtgcactactaacatatcctaatctttgttgaactaatttactataagttttaacttgatcaacagtatatgttaaccaaggaacttcttcttgtctataaataccaggacattgaaataaaatatgcattggacgaattgtattcagaataattatttgcaccacaatgatataaactacctaataatataactgcatcacctttttctaattctgcactaattaattcatctctatatggaggtctttcatcaccccaaaggtgagatcccggtataacttgagttgcagcattttcaacagttgttttacatgttggaaccattaatccaactaaaacatcattacccataacatattcatttgatttaacatgtgttgcatgatgatttttatcatctctatgaattctctgtgccttggcatttggtccaattgccattgtcattcgccattgataataatggatatgttgtataaacagttggtttatcatcataataattagttgtagttctattgaggaaatattcacttacttcttgataaattggatgagagaagaacttttcacgtacaattttagatcttgcaagtaatctaaaacatctctttgtttcaggtgggaataatttaccttcccatggtttatcgttgtctaaatatggttgaacttctttagtgaattatctaagtccttcgtaacttgcgaaattcttcacaataactaaaccatcttttttcaaagctgtaataaagctatctatcggcttctgtaacatctattctctcaaccatttttttggttaatagaaatagttaagaagatattctgaagactgaaaataaacatactcttacatgttacctttatcttaccttatcttatcgtagcaggtagattaaattttatgcgagataagccgattaattcactgggtacattatctgaccttttgattacctacatttggagtttgcgatcaaatcaacttacagcaaatcataatgaaaagttattcactaaaattaaaagataagatactgtttcttgaatagcaatattttaggtagtaaaaaggtacaatcaaagaactaagtatgtaattatcagtatacctgaaaaaccgtgtattttaatcactacattcattatggtcgtctagaatatattattaggtcatatacattgatatatgtatactgatgtaaaactgtaaagcactataccaaaacaaatcaatcattaagcaagattaataaattttatcattgtaattgtcagcatgaaaaaaaatcgtgatcgctaattaatgatctaacagtaccagacgccaattttcatactctttgtaagctgcttacacagacaacaaatgctcaatcatgcaaggataaggaaaggtgttatagtgatattatatgtgctgatagtattggcacttattgaataatatttattcttcaattaaaggtaataataatattttcagcagtaatagtaatagtaataaaaatcaaggtaacaaaaaatccaagggtgcaagtgatttatttgggttaggaagaaatgatagagatgaaatattacaacaactagataaattatccaatatattagttgaacaacaagagaaaagattaattcagttagagagagataatgataatcttgagaaacaaataaaggaattaaagaaaccattaccaaattcatcattaagagaaagacttgcatatgtttatccatatgaatttaaatgaaaaattccagcttatatatggcaaacgtggaaatatggattaaatgatgatagatttggaattgattataaaaaaggtgaagaacaatgggctatattaaatccaaaatttattcatgatatatttaatgatgatacagctaatgcaattatcagacatttatatgttaatttaccggaagttattaaagcatatgaatcattaccacatttattattaaagattgattttttcaaatatttaatattatttgccaaaggtggtgtttatgcagatattgatacagtaccaatacaacctgtacctaattggatacctgaaaatgttgatagtaatgaaattggtatgattattggaattgaaagtgatccaaaggttggattaaattggagaaaaatattatgcacgtagattgcaattttccaattgggttatacaagcctaaacctggacatccaatattaagagaagttattgcaacaattacagagatcacattaacaaacatgaaatcaggtacttacaaaatgccgaagggaaacagagatggaatttttaactgaagttatgaattggacaggtgatggaacatggactgatgttattttcagatattttaatgattatgtgttaagtggtatattctctaaagttacatggaaagattttactaaaatggaagtacctaaattagttagtgatgtattagtattacctgcattctcattcaatgcagtagagagtgaagaggaaaagacagtggaacaagtacacttaaagaataatttcccacctaatcatgtaattaaggatgacacacatccattagcatttgttagacattttagagatagtttgtttatgagtaaggatacagtacttcaagatgaaataaagaattgagtctctgttttcaacttttcttttaactatattcctacttatataatacttattatatacttaatcaacaaccgttaaattccagtataattcaattaaactttaaaactagaagaaatgaatgttgagccccctcacccgccgcaatcatatacgcatcgacgcacagacgcggtggctggttgaagaaagcctcttaatcggaaaaggatggctgtgtttgtgttttacctcttttcggaaggcacgcggtcgcggacgcggtttttctgctggcaggtgaatggaaatttctcgtctgaaacactaacgagacgtatttttttctttttatagatttgatgttattttttatcttactttgctatttgaaatttcttgtttattgtctcttttctatttcctgctctaccccctggttgtttaatttactcgagttaccttcactctttattattgtattctttcctttagtatcagtttttttatctcctattaatccttttttaactccttcctagtaataaacaaagctttcaaaagtatatctacttaccaaccgacctactaacccaagtctttccttcatttattcgattggtcctatttatacaaaacaactactacaacaaccactctttattattaaaattattccaaataacaaactaaaaaaaattaaataattaaaatatcaagttaaattacctatgaaattctctacttcaattctttacaccattgcaactgctttggtttcaacttcatctgttgcagcagattgtcaatatgttggtggtaactattattgtaattcagttgaatgcaattaaatatacaggtattggttttgcaggttcatatcaagatgttaataatatggatgaatcatcatgtcaatgttcttcaaatgctctcgctttctctggtactatgtctccattagatgaagaattatcaatccattttagaggtccacttaaattagcacaatttggtgtttattatccagcttcatcaaatgcaaagagagatgttccaagatgatgaagattgtacaacaactcaacatgttcatcataaacataagagagctcctgctattgaatatacttatgttacacaaactgttttccatgatgctgatggtaatgtcattacttcatctgttcaaactcaaaatccaggtcctgcaaatgctgatacaactttagcaactgtcgttaataatgcccaaactacttcatcaactgaacaaccaactacaactgctgttgcaactattgcttcagctgttacatctgctgctgctgcatcatcagatgcagcaactggtgattgggttagatcatcctatttctctccaggttctgcagataatcttgtctttatgaataatatgggtggtactgcaggttcaggtacatggtcatcatgttttggtaactctatctcattctgtgattctgatggtgtttcaggtgctgcatcacctcaagctttaggtgatgttacaattgcttcaaataaagaatttatgattttttcaggttcaaaatgttcagcttcatcagctgatggtgattgtggttattatagagatggtattccagcttatcatggttttgcaggtgctaataagatttttgtttttgaatttcaaatgcctcaagcaactgatagtgaaactttcaattacgatatgccagctatttggttattaaatgctaaaattccaagaactttacaatacggtaactcagcatgttcttgttggtcaactggttgtggtgaatttgatgtttttgaaattttatcatctggttcagataaattaatcagtcatttacatgatggtcaaggtgcttcatctgcttcagcttatggtggtactggttctgccgactattttaatagaccttatgattctacaatgaaggctgcagttgttttcaaagatggtgaaatctcaattgtcgttcttgatgattcaacttcatttgattcttcattatcaagttcttctgttgattcttggttatctcagagtgcatcaattgcagctctttagatgaaccacattaaagtttttcaaacaaaagttctaataatcaataacaattacaaaatttttctttttctacctacaatgttctttatttttctttcttgtcttgtattttttccatagtttgctttttattcattttccatattgtatagttactacagtttataaccttcaactaaattacttaaaaaataattcgtgtattgcctcctatcttttattagatgagtaactacattataataaaactgttatctgtcagcttgtaccttaaattaatttttaaacactttagatttgatattagagctcctcaaaaacattatttacaatgcttttatttacttataatgtttttttaattcatgtaattgtgtccttgatcaactcttaagatagggcataaaatgggcctgctctttttatgccgagtacaagggcttgataagaaatataaattttgtgtgattgttaaatttatgcattaattcattctttctcttatccacacctgattaataaattacgttgctttcatatagttgaaagataaaataattttaaaagaaaccaataatttttaaaggaatacaccaatacgatcaattcaaaagattaagtttcacattaataaattaacatcgaaaaaaacgtttttttctgcattactataatccctaacaggtacgtcgtttcttttttttcctgctatcatcatattatgaataattttaccagagttcataacatggaccaaagtgggtactttaatgatccaaatacccaaaatataaactacacacaaggctatccacagcaatatagccaagattataatcctaatatatcagaaggtacaaagcaaaacttccctcaaaacagggaattctcacgttcccccaactttcttgtaaatgatacccaaaatatggggggacatcaaatagaagctgatgatgatgatgaagaagaggaatctgaatctgatcttgactccgatgagaattttattgaaactgctacaagtgatatccagcataatagtctcccagtatatcatcataatcaacatggaaataatccaagtatgagtcaacatcattcaaatgtggagtatataacaaccacaccgaatgttcaacaccaacatcgacaatttaaaactctgggtgtattatcaacttcaactacatcatctaaaccatacccacactttttatgtgatggttgtcagaaaataagtgatacatgctatttttgctttcaaaaagaacctaattttaaaagaaaagtaaaccaatttgagttatataatcaaccaaataaagttaatataaatgatgttgtaagaaactgtgataaaaattatatctatgaagaaaatgttgataatgtggataaaatttacgatccatacatcacaagatgtaaaattgatgatgatatagtaaatggtaggaaagttaaaaaagatcatccaggtttttgtcggtattgtctcttaatggatgattggaatgaaaatttttacgaaaggaaataattcaagatatagaggtcatatgattaatacacatggtattcaccccaatggtagtagagttaaattacctgcaaatggaatatactgttataaatggataagaaatcactggtttgaaacaagtggcttttattgtccttatgatggttgtcttgaaacttttacaattggtgaaaaaggacatgggtttcatgaataccttcgtcattggagtaagaaacatgcttagtacagcaaaaaaataatttcatctgctacctctctgttaaataaaatatttctctcctatcccctttttttattggaagctattgcccttttatctgtgtttacttctttttaatttgccacttaaccccatttatttgtacttttaatatttctatagtcgtttcttttgatatctgtgactgattgctcaacataggtatccaactcaagctttgtcaataatataattaccggtgtcccgaaacaaaggacttttttttgatagaagcgtatattataacgtacatctgagaaaaattacttcatcaaagcctgtattgccaaactcaaagtcaaagttaaagaatactcaaatagtcgagctttccattgaagtgagatttaaataatgtctagcttctttcgagattcaaacttatttgctcccctgaataataaaccattattcaaaagtatttcaagtaataataatgatgggaaaagcaaaattttatcaaatgagcattggaaattaaatgataagaaatcaccgaaagattttttgaataaaaagtacgtttttggtaaaaataataagcaaaacaatagcgatgaggaatatgatgccgatgtaaatgataataaagagaatgaagatgaagatgatgttcaaaatgataataataaaagcattgatacaaatgattatgatgtaagtgattgtgtttatgaggaaactgctaacacttctaataacggtgatgatggggatgaggatgaaattaaaattactgaagtaagaagtctttctgttgttcatgacagtaagaaagtggatgaaaatgatggtgaccaacctaacacttcaaatacttttaataattccgttgatgatcaagattttaataatcgcaatagcaaaaatattgggagcaaccacgatatcacaaaatcagatttttcaaaaactgtaaccaaagtgaataatgagcagtctgattcaatttctattaattatttgttaaacacaatttctcatttaagtgaaacaaataaagaacttgaaaagcaaatcattgatttaaagattgaaaatgaaaaagtcaccttgagtgcagagaaaaaaaaagagtcgatttctgctttgaaacatcatatgtcaaaatttaaaactattctcacaaataataatgatgaaatgattgaaatgaaatcaataatgagtgaacttcaaagcaaaaatagtaatttatcattagatttaaataatacaaagaaaaatattttaaaagagaatgagcttcttctatctttgaaaacaatagtctctaatatgaaatctcaaattgtctcaaatgaagcattgattgctcaaaaaaatgaaaagattgaaaatttaaagaaaagagtagatgaatttgccggaagattatcagaggaaaaaataagaaatatagatctaaataagaaattgacggagtcatctcaaaaatatgaatccgaaatgttcaaccttattaaagctaacaatgaaaaaacgcaagagatattagataaagaagaaaatttccaaaaggagttgaataaatcaacaatgtttgtaacacacctggctttttctttattcatttgaacaaatcttgaactattatactaacattcacttacattgtttttttaaagggagctcaaagatactttttctacacttattgttgaaaatacagcaaattttaacacattgaaagcaaatgtagaagataattttactgatattgccgtaagagtgacaagtttaggtagctcaaatgattcaattaaaacatgtatatctgatgctaatgcaaaatctctccactataaagatgaaatcatatctgctttgtccgctgttgataaaaatattatagaacaacttagcttgacacttaattcaatacttgcaaaggttaattcaacatgctctgaagaaatattacaagcagaaattacaaaagttgttggtattattcaagaatcattatgtaacgaaaagctcatcatgaagttacaacaagaaaataaacaagtagtttctaaaaagcaagaattagagaaaaagcaaggcgttttaaatagtgagttgaaggcaaaaaataatgaagttaaaaatcttaacaaagagatcaagacattatctgcagaaaatagcaaactgatgagcaacaatttatctattataagtgagcttgaattagaaaaagaaaagttaaaagaaacatatgagaaagagaaagctgttaatgctggaatggctatcgcacataaagaagaagttaaaaagctgaatgaagagaaacggaaatttgaagaaaaaagtgacaaaatgtttaatgatgaaaagaaagctgttgctaatttaaaaagctctattgatacatgcaacaaaaggattgctgaattagagaaagagaaggtgcagttaactaaagaaatagcttccaaaaacaaaaaggaggagagcttgattgccaaattacattccttagaggaaaaaatcagtgaagaatccgtaaaacaaactgacactgtgaagaaaatttcagcaactactgcctcaatgaaaaagtatgagttgcaattgaaggattataaaactagcatggaagagcaaaaattaaagattgaggagtaccaagaggatatttcaaaattgactcaaagagttcaaaataaagataaagatattgaacatctcaaagcaaccattgaagaaattaagaagaatcaagaaataaaagtacaaaaaataaagcaggaaaacatttcgaatatattctcaaactctagaactagtactacaatcaagcaagaaaagattgcagcagcagcagcagctgtgaaaaaagttgctaagaagacgccacccaaaaaaccttcaaaaaagactggaaaggttgctaaatcgaaaaatgatgatgacgatgatgatttcattgacaaaaaagatattgctagtaaagaaaaagagccagtagaggataaactaaaatctcgtggtaggagtaaacgaaaaataaacgatgatcctttagcaattacacaaactaagagaaaacttatcagttcttcgcaatctacatcagccaagtccacacaacaaaactccaaattgaaaaatggctatgaaaacaaaaatattttgcaagatttagatatttttaacgaatttgaagccattgatagaatgggtacaataggtaaacatggttggtgatttataaataaaatctttgcttttgtatattcagtttttgaaaagtttttgtcaatatttatatccttactatatatcaaatttggtattaaaatatctcctaaaagatggttctgattactggtctataattcttgacctaattcttccatcaactcttcatcatcgaatttatgcataaaaaccactttcttataaccatcacgttcaacgtgtaacacgggtatatcgtatctgtaacaatcaaaccattctttattctcaggtaaacaaatatcaacatactctacatctttaatatttttacgcattttttcatctatattatccaatgcactctctaatacagtgtttgcttcgtaacataacatacattctggtttagtgaagaattttaatctagtaatagttgatttatcagtagtgtatgttctgttgatctgtatggtacttattctactacttaatttggtttttaggcattgtacgggtattcgtatagctgttgcaaacattcttactgttttatttcttagagttgtttggttttagtgtaatctattaaaaagaaacaccttgttaaccagtaaagttatcaaaattttggcaatacaaaatcatgagatttgagaaatgggcggtgcaaaaaagaggtttgacagttttggcagttggtattacttaagagatcaacttagtgttataactgttgtgatgcaaatgcttttaatcgtcaatacatgtttaaatgatatcatagtaaaataaaataaaatataaagttaataaatataaaaaaaactaataatagtcatagtaacaacgtttatctaccaaccaacgtaatcacgtccaacaattctaaaaactctaagcttaccagatttcattttgttaagtttgtatcttccctgttgaacaaccccatttgattgttcgataactttaatcttgttcttcactgtatcataattggtaataattgcaacatgtggtttatcgaatcctactcgatcaacgccatggttctcaaattctgcatggaccagaactaatatatcacctggtcggatttcttcatatgatttacaatcaccgttgttgttacggtaaacaacagcaccaaaagttttattagcaattggtaataatacattttttggtaaattagagaagatgaagctaatgaactctccatcaaatgacttgttcaaacttttaactgcagagttatatgctaaaggaccaaattttgtatattgatcaattaaaacatttgattcaggtttgaccttgtccttactttcatggaaaaataatattctttcaggatcacttgtatcatatgctaattctagtgtactgcatgcaaggtgaacatctaaaatatagtaaactaaataaatgacagttttttcgtttctctttttaatctcagtagtttcaacttcaaaataattttcagtatttctaagctgaggaggtaaagattcacttgtccaccataattcattattgttagaaaccgcactacctgtaactggtgatgaggctgaactgtctaatgatgttctagtaagttgtcttacaacaggtggaattggaggagctatatcatttggaactggtgcgtgtgttggtggtggaggtggtggaggtggggcatgatgtgaatgtattgatgctttacggtatattcctccagttgtaggagctggtggtgcaacagatgatgtattggtctacttgaaactgaggaatgacgagattctgcatttgcaattggaacatgtgcaggaattggactatgaacttctgctgggatttgtggagcttgtgttggagttggtaatgttggaacagatcctggaattggtggaggtattgctgatattggagccggtggcaatgctgaggtagtggttggtggtggcattggtggtctctcagttggaggaatagtttctggcataggtggtggaattgatgatggaatgcttggagcatctgatatagctactggaatatttgttgatgttgctggtgggggtgttgtggttggaggaggtggaggaggaatacgcacttcagctatagtaggagcttttgtgtgagctaatggagctggaatagagccaggaacaagaggtactggtggtgctggtgcattagttggtactggtggtgcagttgtagttggagttgggacattagttggtactggtggtgcagttgtagttggagttgggacattagttggtactggtggtgcagttgtagttggagttgggacattagttggtactggtggtacagttgtagttggagttgggacattagttggtactggtggtgcagttgtagttggagttgggacattaacggctagtgatgcaaaatgtgttctatatggatgagattccattgagggagttttcagttcttccaattctggattttcctccttattatgggtattagtatcttgatattcttcatcatctgtagaatcgtttaaaatagaagattcaggtatttcagatggttggattgaggcaacatcttcatttacatcttcaataatttcgttagcttcttcagtaggttcgtttgataaaactttctctggtaaaggcattcccataattggagcaactcctggtatactcattggaagtataggtattgcaactggtgcatctttaggttcttgagatgtaggtttcttctctttctttgatttctttttctttgttttggaagatacaggtggagctgaaggcatcattcccatcatgcccatcatacccattcctcctgataatttagccattctctcagctaactttcttttacggagttcttcttcatcttcttcgtcttcatcctcttcatcatcgtcactttcttcctcatcctcatcttcatcttcattttcatctgcatcttgatctgtttcttcaacttcattttcttcttctttatcattttctgcattctcgtcttcttgtgtgtaattatctagtatcgactcggttgcttctggaactgggggagctatatttgaaacagtgtcttcataatcatctaatgtgttacctgaaacaattgaagctggaatatcagagtcatgtgtttgagactcattaacattttgatgtttagatttctttctttcctcctttcttttcagtgcagcttctaaagccttttgttcctcttcttgctgtttttgtaacaattgcatacgctcctttaaagtcattcttggagcttctacttcttcagcaaaactagtttcagatataatttcaccagaaacaacatccggttttctttcttcctttctttccttttttggagtacctagtgaaggtggaacataagatgatctgtgttctgcagtaatgaaagattttttaacatagctatcttcctttggaatactcattggaactaaaggattggaaactgtattaaatgactgtaacttatttttgaagttttctggttcatgaataatgttagactcaatatctttgaaatcctgttgagtcggggagctttctgaaacggtttcggcagcttcttttggtgatttttcttcaatatatggttcaacttcatccttttctatttctggagtaacggttttaactggtgatggggtttctggaacaattggcgctggaggagcaggttctgaatatgcttcaacaaatcctctaggaaagtaaccactcaattgatttccggatgcatcctttttagaccctagtaaccaatcatcatccacaatttcagtaacagtgattaaatcatcaactctaagaggtaaatcgtcacttgcattctccggatcaggatcatactgatatctagcaattgctgtataaggaactgacatttttagctaattgaaggataatttcaaacaatttgagttctttagcaatcaaaaatgtaaattggtttgtgtttgtttactaaaacttgttcaaagtcagtaattgagcttgttctaggggtgtaatatcaacaattatcaatgtaaaagtggcgaaattgcaaccaatctccacaaaaacgattaggctcactatttcgcttttatcgaccccaaaaaaagattaaatgtcgacgcgacatttaatttgtgttacctttagggcaacatgaattttagcttcatcttttgtaggacagtcctaaaagaacctgatatttttacataagtgatttatagcagcttttggagaattaccggcattatatagaatggatgatgatgaaaggcgtcctgcaaaacgtctgaaagtttcagaatcctttaaaactaatgatgggcccaaaaattcagtagttggttcgactgacacgaaaactactgagaaaagaattaaactgaaaaccaaaagagttggaggtggaaatgggattatgaatacgattgaaagagaagatttgaatagcaaaaagaaagcaatatcagttggtgaattgaaagcactcaaagagaataagaaaacgggattgtcatcgaaaatgctcacaagtgtcattgatctgaataatgaatctgacgtatctacaaatgcaggatcttcacctttcaaaataatcagatcaagtcaagaatttaacatagactcacctttaaataatagaaaccccctggtagtgggaaatgatgaaagatccaatgcaattcatactccgatagcttttaaaactcgacctagttcggatgatggtatattttggattacaacacctcagtcaggtaatgatatgagtttagttttgaatgcaggtgatgtatcagtaaatatggaaactaaactgccgtcttctcctttaaaagataatcaaaaagatgcatcacttacagagttaccagatactttgctggatccagaattgaagaatttgttaggtaaatatgacaaaatggttagaacaaaaactttagctggcaatggatccgattcccctacattgaatagggcaaattcagactccaaagcattaaacacactgcatcagagctcaaaaggaagtaaagcaagctcaacacagataatagcatcaaaaagtacattaaatgatagtgtcaaaaattctttacgaaaggtttcgggggataagagctcaactgaaaatgacaatttagatctttccagaatgttagtacaaatagcgactaagttaaaaacatccaatactaatgcagtagtagagtctaatgaagaacatagtgaaatggaaattaaaaaagaaccgaaaaaagatattgatgatgaaggatcagatgattttagtgatgatatagactttagtgaagttttaatgaatgctacacaagcggctcctgtgaaaccccaaaatacccaagctgtagtagagagtgatgatagtttcagtgatgatgacgatgatgatttaatggacaaaatagagcttggattaacccaaaatcaactaaggccaacaggtagatcagttactgatcaaactgatgttgaagagtttggtaatgatggaatagaaactaacaaggtgatttccgaaatcaaagagatgaacataaattttaccaatacgataaatagatataaaggtatggtcgttacaaatgaacttgaaaatatgaatgattccaacaataaaccatttcagttatatgatgaaaaggaaaatttagccaaatcagctatcaattattcaacttctaaaagatttcaaattaaagatattcatcaaggtattttcaaacgtgattcacaagctaataaacaatacgtattgaaatgtttaactcctgatgacacttatataaacatcatggttagagatcattggacttcattgaactttaaggttaatgatgtcattcatattatagcaacaaatgaaaatggtagatatcaactggtagataaagaccagaatcttttaatttggaatcctgatacacttatttctgctacaagaattgcagatgctgttggatgtaaaagaaaatccattattaatcaaaaatttgctggcccgggagtcgtgggactacccttaatattaggtacaatagttcattctttattccaacaatgcttaacatctaaaaggttagatgaggaatttgtttcagcagtcatctctgaagaaattaatcttcacatatatgaaatttacatgattgataaaagtagtgaagatataaaaaatatggttttagaacatttcagttacattaaagattggatcaaagcttacattcctgataagctcggtcaatataactatactcctgataaaagaaccgagtttaaggccacaaatgtgttaaacattgaagagaatattttatctccagtttttggaattagaggattgattgatgttgtgatagaggctcagatgaatgacaattcgaaacttgttgttccattagaaatcaaaacaggtcgtgaatatatttccaataaagcacaagtttccctgtatacattattggtaaagcaaagatataatgttgaatcattttatacaagtttagtttacaccaaattacagcaatgttatttaagtgccattaaacataatgatataaaacttttgattaatataagaaatgaactttctcaatatttagtatatgcagtgacagaaatgccgccaatccttgaacaatcatcatgtgaaagatgttttattgtaaatcattgtatggtattaaataaattaactgaagatggaactgctgaaaaaagtggaattgatcctcaaatatacaatgatcttacagaccaacttgacaatccattatataaaaaattctacacgcattgggatagattaattaccaaagaggaaggtttattgcaatttgccaaagctgatttatggcgtaaaacaagtgataatagagaaagtaatggtggtaattgtgtttccaatttaaaagtgatctcatgtgattataatcatgcaaatcaacaatacgtttacattttcaaaagggatgatccaaagagattaccattaaatgctagtcaattagctatcagtgatagagttataataagtgatgaagaaggtaattttggcctagccactggatttgttaaatcaatcaagccaacgacagttattataacaacatccaataattggtcagatatggctgttaaattagatgggtttgataaaacaaataatcaggtattcaagtcagtattaggtgatccaagtgaaatcaatacccggaacttatcattagctacgaaatcaaagttgtatgggattgataaggatttaatttctgttggtatggctacagctagacataatttactaaatttatttttaccaattactggtgattataaaacacgtggactagttgttgatttaagaaaacctgaattcggtaaaccaaggtatgaatatgatacaaaaaattctacaatgaataaagatcaaattagagcaattgacaaagtttcacaaattgaagattatgcattaattttaggaatgccaggaactggtaaaactactgtcattgccacaataattgattgtattgttaagaaaggcatgactgttttaattacatcgtatacacattcagctgttgataatatttgtgagaaactcatcagaaatgctgaagagagaggtgaagaactttcattattaagagttggtgcattatccaaaattagttcaattgttcaaccatatgctatgaacggtaaagaatttgaagaaaaagtgaaaagtaaaaaagattttgataaagcaattgattgtcagattgtggcaagtacatgtttaggtataagtgatgttttcttcactgatttgacaagatttgattattgtatagttgatgaagcatcacaagttgcattacctattgttttaggtcctatttcattttccgataaatttatactagttggagatcattatcaactaccaccacttgttattcaccctgaagctaaacaagatggattagaccaatcattattcaagatattaagtgaagcacatcctgaaagtgtttgtgaattaacttatcaatatagaatgtgttctgatatcatgtcattatctaatgaattaatttatgatggacgtctcaaatgtggatctgagaaagtttctaatcaaatgttaaaaatgccattttttgaatcattaccaattagggatacctgtattaatgaaataattagacctgagagaagagttgtatttattgatgaagattatgttaaaaatattcatgaaattagctttggtgataagattgagaatccaggtgaagccaaattaattgcaattgttattaaatcattagttttaagtggtgtaagagaggaaaatattggagtgatgtcattctatagggcacaacttaaacattttttccaatatctgaatagatataaagatattgaaattttaacagcagatagatttcaaggacgtgataaggatgttattattatatcattagttagaagtgaagtattaggagatttattgaaagaatggagaagggttaatgttgcaatgacaagggctaaatgtaaattaatgatatttggtagtaagaaattattagagagtagtaaagagtttaaagagtttatggatttaatcaattgtaatggatggtgttattcattaaaggagagtgatgagaaggaaatggaagaagttgatttctttcaaaatgaatttaatctgccagtttcagattcacagggtagtatcaatataagtagaaatacaacacagaataggattgattcacagagtaaagttattcaaaagagtaaaatcttaaaatctgttatggaagatatataataatcatactatataataataaataatcacattactttttattttttaaataattacgtttccaattccaatattcaatcagacgattacaggaatatgaagaataatcaaaatctattaaagagattttactttgaatacctgcccatattccccaatatagacctggtaaaccataatgtaatgcaacttcattaactaaatgattaagtaaattttcatcaatattattatttataattttttcattggtatcactattataaggatttaaatttggatttgatgaatgaaatgcattaagataatatttacaccaatttttaacaattaaattttcataattaccatttgaattattataagtaaattgtggaattttcgatttatcacaatcaaaaccttgccattccataaaatgatttgctatatcaaaagctctaggtgctggcatcatatattcataatctataaattgtaaaggatttgaattaaaagattttaaattattagttatttcatctttatttttagagatatctattgatttaggtattattatattacctgataataaatcattatgagagatgactttaactgatgttaaaccaatttcattttgaagccaattaatttcatttagtagtattgaagataatgatgtgttattgtctatattgttattattattatttgataaaatatctgaattttcaatacattgattaatcattgaaggtatatcaggtactttatctacccaatctcttaaaacagaccaaatatctatatctgaagaagaatttgtattaaattttaattttaatttatttaatgaatcattgattatatttatatcagctaatttatgtaaacaagctaattttgaagcaattagagggtataagagattatttgataattcatcaaatgataaacttctaccttcgatgaaaccataaactaaaccattaccaaatctagcatgaattggaggtgctaaatttttagaattaagtattaaatgagagacaaattcacgatctctatcaataattaaatcagtaccattaccataagttctaacaagtacagtttcagttatatttgaaattggattattataattacattcaagcagcatatttgtaataccaccagttaatttttttatatcaattaaattataatgattccaatgactaaatatactcatcattaaagatttaattttttcaatttgatttgaatcttcctctaatggtatataatgatcaggtaaataaattgcatgagatttataatttttcaataatttcataattggagtattttcatgaattgttgaattaatataattatcatttaaaatatttttaggtgaactttgatttgaatcaaatgatgaaactgttttattatctaaaaattgactataaataggataatttaatggagtattagctgtgttattattgaaaagggtattgttaatagtattatcattcaatataaaatttgaaccattatttgaatgagaataaggtaagaaatgtaaatcaccattagttaataaacaatatgatgatgaaggtgagggagagtctaaattgttgttattatcatttatattaagaggaattgaagattttatttgatcagtaggcattataacgattaattatgataaattatgattataattattattattattattatgatttagttgattagaatataatgaaaagtataatatagtagagtagtatagttaaaaagacaaatattaagggaatgtggttaataaatagagtgtataatagatgtttaaaaggaagcagaagtaagtaaaatgaacaaaagaaacgaaaagggagttgaaatgtgcatgtacgataaaatttacgagattaacgtggcttactagttatattatgagatattgattacatttactgtatattcatattgtctttgtagtttgtatatgctatctactgtatattattgatacaagcactgttgctcttgacccaattattgtctttaatgcaaaaggataagataagattagagcaaaaagaagggttacaaagtgaatattacatgcttccttccttccattactggttataaaaagtcttaacagtaatagaagctaatatttaaaaaaattattgtataatcgacaactgcaggattcgaacctgcgcgggcaaagcccaaaagatttctaatctttctccttaaccactcggacaaattgcctatttactaaaaaagtattggctatgtttgtggtatggtgtacatataatctgaggtcacgtgacacgtgttaaaaaattatatttttgaatgttttttgatttcataatgttttaaattgtaaattttttgaataatttgaatacaataaatttttattacaatttttaatatttgtttattaaatattcacagtttgttaaaaaaaatctcacttcctatctagtcatttataaaaattataaccgatagcaccactaacacttctacaaggtagaacaacaatgacaatacttacactattctatactcttattatactatactatccacacctaattaacgcctcagtttatcttccccatatacataataatttcatcactagaaaaaaacctcgcgcatcacttgaaatagtctaagctgcccttttaaacatttaataatcttgaaattagattataattatataataatgctcatcagatcttttctgtttccttttaactcttcatgaattctcaattatcaatagcaatatgtcattctttaaatctccatttgcttcaaataatgcttcaactcatagtataaatacaaattataacaataataataatagcaataataacactcatttaagttcagtaaattctacaacttcaattaatgatatacgaaataattataataacaatagtaatggtagtaacgatgttgtgtctttagctccaagtaaaaaatcattaacttatatacttaattctaataatcatctggaatcagttaatgaaatgaaaggtcatcattgtatcggtgttaattcattaatttataataaatctgaaaaatctttaatatcaggtggtagagatggtcaaataagtatttggaaatttaataatgataattctaatgaaaattccaattcaagtgaaatatttgataataaaattagatcaaataatgaaattagaaatcatataattaataatttaaataatgaaaatgaatttaaaaatttaggaaatagtataaatgatggaattaaatcattatcaattaataaatcaaattcaattccaaattattataaaagttcttaccttcatcattttggttggattaatgatatgaaattaataaatagtagtagttataataccaactcaattatagcctcttgttcaaatgatttatcaattaaattatggaattataataatgatcaaatatcagttttaggttatcatgatgattatattaaaaaaattggttataatgaaaattttagtgatcaattagtttctggtggtttagataaaattattaaaatttgggatattaataaacaaaaatcaatttcaaattataaattcaaagattttaataattcaatttattcacttgatgttaataataataatttaattatctgttcaggtccttcaaatataattacacttttcgatagacgtgatttaaataaaccaataaaaaatttcttaggtcatactgataatgttagatctttaattttaaaggataattcatttttatcaggttcttccgatacaacaattaaattatgggatttacgtacaactagaattttacgtaattttgaaatgcataattcaccagtttggtcactttattcaccaacttattcaaataatgattttacaattttttattcagctgataaatcaggtttattattgaaaaatgatttaagatcttcaaatttaaattctaatagtatcaatgatgattattttaaatttaaagttaatgaatctttaggtataagtacaatcattgcaaatgttaattttaataataaattaaataatgagaatagtgattcaactactaataatacattatttgattcaggtattaatgatattgttgaaactgatgatttaggtatgatttggactgcaacatcaccaaatattcataattttgatactaattttataagtagttggacaatacctcaaactggtaagttggtaatgtatcaaggcttaatattaaataaaaaattaacaagtttatcagatgatacaaatgataataataataataataatgccactaatgatactaccactgatgatataataactaataatcttgaaaaatcaacaattaatgatgattatgaagatttagtaagtcaattaagtggtgatgatttagatcaaattgacaatgcattattttcaaattcaaatggtttagataacattttacatgaagggaatattgattttaataataatgaaaaattatcatcaatgtatctgctcggagatgatgaagagagtagtatcggagtttatgatgatagagtaaattatgataatgatgaagattttggattagctacatgtttccttaatacattgggtaatttaaatacacaatttttattatctgatgattgttttaatgaagatgaatcacaaacctcacaagaacttgatcctttcaataatactaaaaatttctacaaacaataataatataatacagattaataggaaaattagactaaataatgaagatattgatgaaaatgatgtatttttattaccatataattttaaaccaattagtacaatatcaggtacaagtggattaattaagagtaaaatattaaatgataaaagacatgttgcagcaatggatcaaagtggatgtgtttatatatttgatattttacaaggtataatgattagaagagttgataataatttatcaattaatagtatagaaacaattgataaaaatttaagattgataaaacataaagaaaattataataatgaaataaatgaaattaatgaaaagtcattaaatttaatggatagatttgaagcagtttgtgaaaaatttcaaacaactgaatcattaccgtcatggtgttcagttcaagttaaatcaggtcaattatttattacattacaagaaaataattttacatcatgtgaaatttacaatgatgaatttaatgagtattatagtgttaacaataagaacaataacaataccaacaataatgataatatatttagagttaatttgggcaagattatcattaaatcaattttccgtaattgtttggaaaacataattaatgaaagacatattaaattagggtctgatattggaacagttgaagaagaagttgattcatttcaaatgaataggaataaaaacaaatcaataaatgtagttgatgaaaaagctgagaaggctgaaagaacaatgaaaataccacaaccaagctccccaaataagggataatgataaggaaaaggaaaaagagaaaaaatctagaggattatttggtagattaaagggtaaggaatctaaaagggagattgagagaaacaatagtgataataataataacaataaacttgagaattgtttagaaaagattcaacatattgataatagtgaagaattaattgaatatttatcaaagaataaaaatattttcaaaatattgaaaacacaggaaggatatagtgaaagagagagagataataagaatatgccagtttttgagtataatgatagtaatatattagttgttattaatgaagagactggacgtgaatctcgacctgcatatactgttacaattgataaattatcaaaagattatggaattaatcattttgaaatactgaaaaaattaccaatttggataactaaaggattattattacacatgtatccaataccatcctcaatgactaataagattgggtttacctttatcaccatatattgaaactgatagggagagtaaattacctaagattgatgataatagtaatggaacagttggattaaaattaaatggtgttggatcattacgagttagtagaatatgtgaatttgtcaatgggaaattacctgagaatgttcgatcaaagaattggagattatctgtcgtggtaaagtacttgatgagaaggatactttaggtaccagttaaggccagagtatggagacaaggtggtgatattgagttgttactacaggtagtaatagataaagtgtataattgtgtaaagagacgatgggactgtaaggaactgaaaaattttctaagaaaaagaaaaaaatgagaaataagaaacttcaacatgaattgaataattttgattttgatgttgtgtatataggttttgtatttttttttattggatagggtaatagaatataatagagtagagtagtatggaggacgttgacagaaccacatcacgtttatggagagcttatcgtacggtgaaggaaatggtatcagatcgtggatattttatttctaaggaggaattagaaatgtcattagagcaatttagagagaaaatgtgtgattcaatgggtatgccacaacgtaaattaatgtcatttcaagctaatccacttcaagaatcacttgaaaaatatggagatttaggaccattatgggttgaattttgtgatgaaccatcagttggtattcaaacaatgaaaaatttttgtgctcatataactgataaaaattttacaacaggtttatttatatatcaaaaaaatttaacaccaagtgcaacaaaggcaattgcagttgcagaacctgcaacaattgaaatttttcaagaaactgatattattgttaatattactcatcatgaattagttccaaaacatattagattaagtaatgaagaaaagaaagatttattaacaagatatagattaaaggagagtcaattaccaagaattcaaagtgaagatccagttgcaagatatttaggtttaaagagaggtcaagtagtgaaaattattagaagaagtgaaacttctggtagatatgcctcttatagaatttgtttataatatctatcaattgtatgtatgtattaattaattaactaactgataataaataactttttacctttacttttgcatcttacatttgcatttattttaattttgaacacataacagaatctgaaatacctttccaccatgtaacatcttttaagtgataatgggattttaggtgaaactgatactccattttcacctaaaaacacaggtccaatagtaattatcaatgaatcaacaatatcagggcacaataatagatcatttataatatatgcaccaccttcaatcataaatttatgtaatccaaattgatcttcacattgattcaatatactattccaagataatttaccatcaccgttatttctccttattctaacaatatcacaattaaatctatcatcacttacttctatatcatcacttataactactacaggtttattaccattaccattaagataattttccactaatttatatttttcaaccttactttctttactaaatatttccattgatttaaatgttggatcaataattatcggtgttattctattaccttcaccatacctacaattaagtgatggattatccgctaataatgttccaatacctatcactaatgaatcatgaaatgatctaatataatgtgtcattgtctttgtctcttcatgtgatatatgagtacgtaatcctttaccagctgcaatctttgaatcaatactctgtgcataagttaaagttacatgtctacgtctatgtctatgaatagaactggatgataaatacggtttcaatactgggaatacagggactcatcaataggatgtaatgacattgtatagtggtaatacgggagatagtggatataccagatcaaagaagaagaggctgtttatattattctagtatttatataacggacatagcggtgaatcatgaaaattttcagtggaaattattttgacaccttttgccaatctttccatttcttttcagtacttaaacaagagggtatcccatccgtataagtagtaacaataatataatttccatcatgtctcatcgtcgtgtgttaactagtaatatgttgaaaaacgtaccacatcaaacaacttctacaacttcaaaattatcattacaatcatgtttaacatttaataatgttttccaacatcctgatataccaagatctcaacagaggcgtcagtttcataaatctcataataagaaaaataccactagatcaaccgccaccacttcatcatcatcatcattatgctgttaatgaatttaaaaatttaactaaaaatataccaaaatcttcattaccatattataaacaattacttgcatttgatgaatgtttagcacataattcatttttcgatcctaaaactggtgaagtacccggtggtacagttaaattttgggattcagttgaaaaaattatgccattatatgatgaattaattttaactggtgaattaaatcagagaagaattgatgaattaatttcacttttaagaaatggtttaagaatgcatagatttgaattatctaaattaaagaaaaatattgatagagatttaaattctccttctacaacaaatgcaaaattatttacaaaattcacttattaagataagtaatgatataattaataaaaattttggtgatgatattaatataagttcaagaggtttaacaaatttatttaaagcatttactgatatgagattaattgatgaagcaacaattatttggaataaaggtaagaaagatcctaaattatttcaattatttacaagtgaatcagttttaggttcaattttaacattattaattgaaaataaagattttgattatgaagaaatttcaaatatttatgaaactattaaaaaaaataaacatggtaaagaaataattcatagtgaattacaagttgcaatgattagaggcaagtttaattaaatgtcaaactactaaagcattaaatatttttaaagaaattacaactgatgtaattgaattttatagtaataaaaattcttcaccacctgttgcagttaaaaattatatgacaatggcacatttatcatttattggatattgtcaagattatgaaactgctaatatatttttcaatgattcatttaagaatgaaatgccatatttaacaccaattcaaattaattatgttaaaaaatttatgcaaaatacatggaataatacaaaagattttgataaagttaccaaaatttggcttttaacatggaattattttgaaattaataaaaaatcaacaactgcaatttcatcatcattaaatgatatttaccttgaaattttctttgaaaaatataatatatttaataatgaaagtgcaaataaattaaaagaaattttaacagattataataaaattaaatcaatggatgaaccattctttaattgtcttataactaaatcacaaaaatggtcaaatgttgatattttcagatcaattgttaaaatgggagatttatataatttcccaaagacaaatgtttatcatagatgtgtacttaaatcaagtggatcagttaatgaattatcaattgaagaaatttatcaatttttccaaagattaattcaatcaaatattcaattaggttgtaataatttaacaaatgcagattggtttgcatttagggatgcaacaattcattcaaaatttattaataatgataaaattaacttatattttaaattatttaaattaagttgtaaacatttcttaagtttacaaaattttaaactttacatgaatttagatattggattagatagaaggtataaaaatgtttatgatgaatttgatcgtgttgatgttagtgatattgaagtgatagaattacaatggtttaataaatgcagagccatagaggaatattggcaacaacgtggtgttgatatataattaattttacatacagattaacatataattttaaataaactattctttaataaaatatacctttaatttaatacatgtttcttatagtgagaaatttaaaatttaatctttttactttaattattattagttatttctttctttttgataagtatattattattattataatacagacaacaatggatagatccaatgagtcttcgttgccaatgtctaatgaggggatatcggggattggtaatatatctaatttatcaagtatggatatgaataatattaattcaatgaatatgagtagcatgaataatttaagtggtattggtagtatgagtaatatgaataatattaatagtatgaataatagtataaataatatgaataatcttaatgggatgggaaatatgcatatgatgaataatatgaatcatacgaataatacgaataatatgaacaatatgaacaatatgaacaatatgaatttaggtatgaatatgggcatgggtttaaatatgaatatgaatatgatgaacaagttaaacaatttaaacaatttaaacaatcttaatggtatgaatttaaataatttgaataatatgacaatgaatcatttaaataatttaaacaatttaaatatgtcattaccatcaattcaagatttacaacctttaccaaagagaggtcgtggacgtccacgtaaatttacaattgaggaacgtccatcaagaccaaaattaccaccagtttatgataaagatggtaatataattaaacgtaaacgtggtagaccacgtaaatatccattacctgatccagatgaggcaaataaaccaaagagaggtcgtggtagaccacgtaaagaagtaattttaaatgatgaacaaatacgacaacaaaagcaagcagatgaagctgctgttaatgtttcaaatactgttacaagtacaaatgtagttgaatctgaaacaacatcaacattaacatctacatcaacatcagaatctcaattatcatcatctatattacgaggggtcacaccacccatacttgcacagtccactcaaaaagaaggtcaagagaagatcaatgatagtaataaaaatgatagtaaagacactaccaaagatactaccggagataccatagaagacaccaatagtaacaattccaacacacttactaaacaaactacatctgaaccgattcaagatacacaaccatccaataatgggaagaaagacgatgagatgatactacatgtgaacaacttgtccaacatgacaatgctaaacaaagtaaactctaatgatctggccactctcatggattttacaacttgacccttcttcttcttcttttcatttctttgcttctttatttacactttatattgtattatactgtattgtactattttgtaatattcaatgggaaactgttcctcaactgatactgttaagagaccatcaaaagaggctaaacaagctaagccgagtacgcccactataagggtaacaaaaccaccaacagtacaaaaatctagtgccaataagaaaaacaaagcattccctaaggaaacacatcaattagcaactaatgatccatcaactacaacaactaacattaattcattaactccaacacaattagcagctcaggcagctgaagcaagatcaaagaatagaagataaatgtattgattattataattataactctctttaatttctatactgcatatagtttatatgtaggttattaatactaatactaatactaatactaatactaatactaatactaatactagtactataacataataccaatataatactaatactaatatagtagtaatactaacataatactaatgataatacaatctatcagataaatcgatacttacaaatacatcacatatacaaaatcaaacaagccatcaataagaccatactacattacaaatcaaacgaaatacctataatccaggccccaaagtgattacttattacttatacaatacacttaatgattccaagtgactcttataaaattaaaattaaaattgaagcgataacgaaattgaaaaattatttttttttaatttaaatataagccttttattaacctttttttattctaaacttttgcatctatttcactaaacaaaatggaaaaggaagatatagacgaaggatctagattatatcaaccagatagtgattcatatgatgcatttgcacatgaaaatgatcaagtattcccagaaggtggttggaaagcttggattacagttattggtacattatttggtttaatgacagttttcggtattatggatacaatggcttcaattcaactttatattacaaaacatcaattagaagatgttaaattaagttcagtttcatggattttctccctttatatgtttacaaatttagcacttggtattatcgcaggtccaattttcgatatttatggtattaaaaaaattttattagttggtatgattcttaattgtggtggtttatatgcaactgcattttgtactgaattatggcattttgttttaagttttggtatttgtacaggtattggatcaggtttaatgttaactcctttagttggtgttgttagtcattggtttttgaaaaaaagaggtttagcaaatggtgtttctgaatgtggttcagtttcaggtgttttcttcccaattatgcttagaagtttatatccttccttaggttataaaaaggcaatgattattttagcttcaatttgtgttattttctcaattattgcatattttacagttcaagatagataagatgaattacataaagaatctttacatataccaaaaaagacaagattaattaaagcttataaaaatatggttaattttaaaaattttaaagaaaaaaattatttattccttgtaatttcaatgttctttgatgaattttcaattattttagttattacatatattgcaacttatggtgcagctagagatatacctgaatcaacaacttatattattgttacagttatgaatgcatcaggtattttaggtaaagttataccagcatatttaagtgataaatttggtcgttttaatataatgttattaattatgttaacattagttatttcattatttgcaatttggttaccattttataatttagcaggtttttatatttttgcaattgtttatggatttgcatttggtgcagttttcgcattaacaccagttttaattgcacaaatttctaaaacaaaggaatttggttcaagatatgcaatggcttattttattgttgcatttggtaatttaatttcaatgccaattggttcccaatttattaatgaagaaactgttcaaaattatgatcatatgattatatttgcaggttcaacttgtgcatttgcaactttcttattacttttgagtagatatgatatggttggttggaaaattaaagcttatgtttaagtttatatatgatgccgttcttagatttttactatattcttttctcttttcttctcttcttttctctccttcagagttctttttaattaatataaacttaatttataatgattcatatacttagcataaatagattaattcatactcatcatgctaaactagctaaatcttcaatatcattcaaggaaacatccactcttatcgcccaatcaatgatccgcacgactaaccatgccctaattgcacattcatattgggaaaacctcaggaagaacaataaagataagaataacaactccgaatataaacaaataccagatgattcaagatttatggataaacattacaatgaattaattaattacagagataaaattgtcggagttggtggatcatttaatgatttaaatagtattacagaattattctttaaattaagtaaattatatccaaatgaaggtaaacctgaacaaattgaattatttaataaatttattgatgatttatggcaattattaatgttaaatggtggttatattgatatattagatttaatgatttataataagcaggtatttgatcattgcgaaagtacaaaacatcatgtttaattaattttttatactattatagtactttcttttatttcttctttatataaatataacacacacaatgccatttactataactaattggtcaattgatcgtaatcatttaggtcttaatagaataccattttataatattgcagttaaatggaaattatctgatttaatttacgttttcctaatttatgcccttgattggatttattttgaaaatattaaacctttccaacgtcaatttacaattaatgatataacaatttcacatccatttgcagaacatgaacgtgtacctggtgatgtattattaaaatggattacaattttcccatttataattataccaataatttcattattattaactccaagaccatttaaattatacattatttatttatcattattaggagttttcattagtatgggtacatgtatttttgttactgatgttttgaaaaattggattggtcgttgtagacctgatttcttagcaagatgtaaaccaatggataatttattacctgatacattatatcttgctaaagatgtttgtacaactaaagatttgggtaaattattagatggatttagaacaacaccatctggacattcatcaatgtcatggtcatcatttggttatgtatcattatggttaaatggtcaattaaattgttcacatgttcatagaggtgcatggagatcaattgttgcatttttaccatgtttaattgcattttatgttgcattaagtagaactcaagattatagacatcattttattgatattatcttaggttcattaattggttcatttattgcttggtggagttatcgtagatatttcccaaaaattaattcaagaggttgttatataccttatgttttacttgaaaaagttggtagtttaaataatgaaaataatcaagctgctcatgattattataatgatgttcaattagcaatgggtacttatgtaccaactgcaactcaatcaaatgatggtaatgaacttgaccttgatcttgaaaattcaccaaattttatcttttaatagtgccacttctttataattattcatctatttatataatacaaaataccataatatacaacccaatatacatatacatcaaactatacattctctctagctatacgagcatttctttcacgatgaagtctagataattcacgttttttccataattctttatcttcaatttgatcagtatcatcaatttcttcacaaattatttcctcttcattaaataatgtagttttagttgatttaacatttgcaagattagaatttataattgataatgcaatcttttcattaatgtcactatcttgagtatcttctttactgatattaggtaaaggttttttaaaagttacatttctcttaaacccagaattagaatcagattcagaacttgaacttgaacctgactccgagtccgaactaccagaaccagagaaactcattgcattgtcctttaagaagaagcatcagattaaagagagtgtctattttaaggctgtgagaagtgaaattttgattttcaataaattttttttacatgaaattttttttttcactaagttttatatcttttctatatatattcagcaactacttcatacaaacaatgtcagcaatttataaggcaattagtggaggtaagaagaagactgataattctatttctaaaccagaagataataaacgtatcaatagacagagagttttacttatttcatcaagaggtataacgtatcgtcatagacatttaatatctgatttacaatcattattaccacatgcaagaaaggaaccaaaattagatacaaagaagacattatatgaattaaatgaaattgcagaattatacaattgtaataatataatgtattttgaatgtcgtaaacatgaagatttatatttatggatttctaaaccaccaaatggtccaacaattaaatttcatgtaatgaatttacatacattagatgaattaaattttacaggtaattgtcttaaaggttcaagaccaattttaagttttgataaaaaatttgatagtgaagaacattggaaattatcaaaagaattatttattcatcaatttggtgtaccaccacaagctaggaaaagtaaaccatttattgatcatgttatgacattttcaattgttgatggtaaaatttgggttagaaattatcaaattaatgaaaatgaagaattaaagaaaaatgaagaattaattaatgataaaattaataatgatgatttaacattaattgaaattggtccaagatttgttttaacaccaattgttatattagagggatcatttggtggaccaaaaatttatgaaaataaggaatatgtttcaccaaatgttgttagagctcaaaataaatttaaacaagcagaacaagcaaaggagagacaaattcaagcaatggatcgtaaagttcgtaaacgtacccaagttattaaaaatgatccattatcaaatgaaactatctttaatgaagattaaatgatatatagatacgatacatatttctttgaataagattttttcataagtttaaataaataaataaatattatatataaaatattatataagtaattaataatataattaaacactcttaagaatgttcctttaagaaatcattaatatatttttcttcatcagaagttgcagcttcaactttaacttctttctttggagttgcagcccaaggttttggagcagctaaaagaacgacagcaccaattgtacctaatgcaagaatttgtggaggaacagatttacctaagatagtatatgcagcacccattattaaatgattatattgtttaaagatttaatcaggaattcaaatgaaaagattgctataccttccatgtatactcttattcatgttgaagatcaaaaaatgttaatttctaaagagtagtgagattgttattggacagtgttagtattttaattaatggtgtactaatgtagaaagaccgtcgcgtctgtttagaagattatcttacactacatgaatatttcactttaagtaaggatagagtataggacattggatattcatttggcaaaggatgttaagacaatcgataagattacaatctacattaaataacaatactttacgttcaattaaaccaacaaaattgaaaagaaagaagagatcacttgaagaaagtgtttcatttgaagattttgtacttaagggacaagttttacatgtttatagagatattttacgtagtatttataaagtacctgataaatcattgagagaagaagttaaatttttcattaagggagaatttaaggcaactcaaaatgttactgatttaaatacaaagagatcattattaattggtggtatacgacaatggaaaagtgtttgtaataatatgggtttatcatatactgatataagttttttaaatattgtatgtatgtgtgtttaatgattttgtttatagagtttagtatatacatgatataaatagtatagtatagtatagtatactaacgtttaacccaagttggcatttttctagctttctttttaccaggtttctttctttcaactgatcttggatctctatgtaataaacctgcacttgaaagtttttgtttatataatggattatgaatacataaagctcttgataatgctaattgtaatgaaccaatttgacctgttggtccaccacctcttgataaaccaaaaatattataattattctcttcctcaacaacttgtaatggatataataattttaatctatcttgttctttagggaaaacttcttcaattgatttaccattaattaaaatttctccattacctttaacaagataaatttttgctgatgatgattttcttctaccaattgcaattgctctacctttattatctaaagttttaacttcacttaatgaattaaaatcattcttcttcttttgatattcagataaaatttcattaatttcatcacttcttaattcaatatcaattgaatcaattctttttaaaatatttaataattgtaaatattcagtctcttttaataattcaccacctgctttttccttatattgtttaaatttaagccatgatgaagttgatgatttcctattaaatggtaatgttgcatttttatttaaaatatcttgtaattttgacatatgaatttcatgatatggatttctagcataaaaagttggaatacttggtacaattctacgttgttctaattctggaatatatcttgaaattaatggatcattatataatttattatgtggtttaaatattattttttcaaaatttctatttcttgattctggaattgttggtggttctaaaatttcaactttttcacctgtacttgttgttgtagttgtagttgttgaagtagaagtagtacttgcactactaatagtactattaaaacgtactgaagatatcaaagatgacctaatagaggtcaaacgattcatcattttacttgtctatagaatattaaataaataccaactacctacttctcttcctcttgtaacttttcattcttcaatttacgattcaatcttttttcacgtctctccaacattggattcttcaattttaattttttttcaacagccgatcgacgcacccgtacattattaaaatcaccatgattacgtaacccacacaaatcaaataaacactgcgccaccacattgactccatgcgccacatcacttttacaaatagtggcaaaacttggaggctcaattttcaatgggattgactgcgccactgctactatcttatctattgcaccgccacatttatcaactttatttataattacgtaaattgaaatacccattgattcaatcatttcaaatatcatttcatcatgaactgttataccaatattaccatcaattaccatgaaaattccctttaaattatcccttctctccatataatccataaccaatttaccttgccattttttacccttttgtccatatcctggactatcaacaattcttaatttacctccaatattataaaaatttaaacatggtgtataaccagcttcatttttaacatgtgcaaatttttcaatgtttttattctttcttgtcggattacttaataataaattaattattgatgatttaccaacattacacctaccaataaataaaatttcaggtatttcattatttaattctttaactttttcaaaattatgtgcactccattccctccaaatatgactatcttgcataaatttactcataatggaaaatttatcattatttacactccatttactttcaattggtgttaatttacttaattctttattaacttctcgtacaaatttctcattcttatccatttgtactttcttagtaccatttgtagtattaacactcacacttttagctttaataactggttccttcactagttctgctaattttgaatattttccaataacatcactataatgtcgtatactattacctattcccttccaatacattgctgataagaacccaatgatatatacctctatcatgaaaaattttgacattagaaaaaaaaagctatactaattattatacatttcattacgtaatcatctacatttgttcactatacgtctttgctaaacttctaatagttgcaacaatatcacgacattcctttgcattttgtgcttcaagataatattttttaacaaatccttcatcatttttcttaattataattttaaaatgatttggtattttcggattttgctttattttcaaaatttgtgaaatttcaaaattatatgttttagaatcataccatgtacccttaaattcattaaatggtaataaataaatcgtataaccatcaactgttaatgtctttggtaatttattcttaaatttcatatgttgtcttctccaaactgtccatctatgatacattaatgcattattagtctcatcatcaaattcatttaaattattcttcaacatattgttattattctttaataaattatgattactattattgttatcatcattactaatcgtactcttattccgattcttattcatcatactacccatattcatactcatacttaaattcataaccatactcttactgttattaccaataatactattaccaccaccaacaaaactgttatgatgatgaatattattattactattattattattgttattattattattattattatcattattaccattattaccacctaagcctaaacctaatccaaaaagactatcaccatcattcctatctttaatctcattcctttcactatgttcctcacttcttcttctattatcatgattattatcattaattataccaactatttcattattactattgtttaaatcttctattgaatgtttattactatcataaggtgtattatatgctcgaaataattcttgttgtgttaattgataatgttcagctgtattatgcagtatactttgtaatgtattattcttcatcttgaatttacctaatttactctccttattatctccattggtattgttattatctccattattattattaacattgttattcaaatatttattgtatttatacatatgatacttcttttgtaattgtccatctcctttaattttaactgacattttattactaatattaccaatacctgtagatattttattactgctgagtttccttgaaatggatttattaacatgattattattgttaattttattatcctcctcattaattccagtttcaaaatcactatcatcatcatcatcatcactatcggaatcatcaataataaatctttgactattactaatatcattatattgtttagttctgggtatggctttaagtttattattatttctaatattattatcattagctagtaattgtgcaacatcaggcgttaaatcagatggtaatgttgcaactgatattcccatatcattaatattaacattttcagttggtgaactttgttccatttcaacactaccttcaaaactggttgctgaatttaatccactaatctcattcttattattatctaatggtgatggagttttcttttcattaattgcaaattcttcatctgtacatttaattataacaaattcatcagttccatatgattcaatacttctaagtctatctaacattaccaaaatcatcctcaatctctccatcatctgcaatatacattttccaataatttggattatttaaaatatctttattgatatcaaattttttattaccttctttaagtttaaataaaacatatcctattaattcaacaacatgaacagatgaatttaccaaatatgtttcaggttcaatcatacctaaatcaggtagataaatactttaattcaatcagtttatcattaacgttttgtttatctccaacatatttataatatgataatgaaatttcctttttattaattaattctgtaagttttgaagaatgctttattacattgttcacatcaattttatatggtttaaacatttctttctttcttaattcctcttcatgttctaaatcaactttcttatgtctttcatgtcttttgatcttttcattttcatgaacattgtaaagactattaaaacttttaactgatttataactttgtttacttaatcgtctagttgttttagtagaaatcgtactagataatgatgacatatcggaatgcccatgtttcttattattattattttttatattaccatcagttgtctcaggtcgacttttaataaaacttatatttgatatagaatttttcttttctttattaattaatggttgaggaatgatatcattatcatttaatgaatcatcatcaattactgatctgtccagtgacggtaaagaatgtgaaattgaatgtgatacagaattttcagaatcatacgttatttgatcatcaatcgcttcattgatactaacatcatcatcatcactttcatccgtaaactcatcatcatcatcatcatcgtcatcataatcagcatcttcatcgtcatcgtcatccattccattgaatgcatttggtgttaatcctaacattgcagcatgtggtgataatgaattttgtgttgaattaaagtaatcataatcagaatcagccaattcacttgattcaattgaatcaacaacagaatcattatcactatcgtcataatgatcattataattatttggtttattcactatattatcatcatcagatgaatttatcagatctctttcagaattagatgaggaaatatattgatctgaatcaaaatcatcatgtttaacataattagaatgcgtccttataatatttcttttaacttccttacctctttccatttccaattctcttttattttgagcagtttctatactttccatatcactttgactttcaacattattattattatctttcccagtacttttactagtgccctgcactactcctactcctactagcaatcccaccgtcaaatcttattggtggtgaattagccaatttgttagaaagaaaggggaaaacttcatttatacagtttttattattattatcgatatcattgaataatatttccttattataaactgtaccaaataatgaagatgaattattcgtgttgtttgttatacttaaactatttgtattgtataatgtatcagtaacagaaagacatgtttcacgtaagatattaataagtaatgtctcatctaatggtaatgccattatctgattgatgccttcaaagaaatgacaagaaggaatgttctagtaataaataaagtttagattttgatgataataataataatcctcgcggattcatgtggaagttagaattagatgaggctgatggcttatttccattttaatgtttagtttgaatttgtgatttatttactacttcttttaacgacaacaacaatggtcaaagatactgaatattatgatttaattggtgtatctccagatgcaactgatctagagattaaaaaggggtacagaaaagcagcattaaaatggcatccctgataaaaatcctaataatccagaagctgagaaaaaatttcaagaaattgcagaggcatatcaaattttaagtgatccacaaaagagaacaatttatgatgaagttggtaaagaagaattaaatcaacaaggtaatggtgcaagtcaagatattgatccaaaggaatttttcagtatgattttcggtggtgaagcatcaaaagattatattggtgaattaaattttattcaaatgatgtttgatgcagagaaggaacatgaagagggaaatgatggtaatgatggtaatgatgaaaataatgtttctaaaagaaggagacttctaatacttcaagtcatgttacattacatgatggtaattcaaagacttttactgaattaaatgaagagggcaaagaagcaacaaaggaaaagaggaaaacaaggtattgattcagaggctattaagaaacaacgtgaagaggaagagaaaaaagttaaagaattaagtgaaaaattaaaatccaagatgaatccattattagagagtgttcaaaatggtcatcttaatacaagtggtaaagattgggaaatatttcaaaagaaagttaatgaagatattgaagaattaaaattagaatcatttggattagatatttgtcatttaattggtaagatttatacatttaaggcaacatcatatttaaaatcacgtaaacaatttactggtggatttcataaaattacttcaaattttaaacaaagtaaagatacagttaaaggtatgatggatatgttatcaagtgcaaatgaagcacaaaatacattagaggcaatgcaacaattagagggagttaatttagaagatatggatccatataagagagcacaatatgaacaagcagttacaggtaaatttatttcagttgcatggatgtcatcaaaatttgaaattcaacaaacattatatgcagtttgtaatttaattcttaatgataaagagataagtagtgataagaggaaattacgtgctgaaatattacttgaaatgggtaagatgtttagtaatgccaagagagatgaaagtgaagaagaagatcaacaagttttcgagaaattaatgaaggatgcaaatgagatgaaggcaagagatttaaagagagaagctaatatgaaggcaagggaagaaatgagacagagtttacgtgttgaaagagaggaacgttcacaagctcgtcttcatcataatgataataaattagatgcatcagatattaaatcagatgcatcatctacttcaaattctaatactacatcaagtagttcaggattctttggacgcagattaaagaaattcttataataaatataattaatatataataattagattttgtattcagtgtattattacatagattgtctttaataataattagtaattatcttaatataataattttgaatttattattaataattatagatcagatcaataattcaagaaattacccgtttagggtacttcctatttaggaaagtgagaaaatcacaagagcgacttggaaatctttttctatgagaaaaaccaatttactatgtaactgatcacagaacagaacattcattttttgcagattatgccatttcgcacagtaattgaaaatccgacttggaatgcgcattgtaagggtctgtttcgtaaatacctaattaggaaatttcttaatactaggtgaaacattttatttatttacatcaatatcccatacaattatgccaattttttgctgttttgaaattctacagtatactcacaatcaaatacttcattactatatctaccaagtaattatcaagtaaattaccccaatgaaacaagtaaatccataatatcaattctctttactagagaaacccttaaaaaaccaaaatttttcatttaacgtcgcttataaaaagaaagtacttcccagctaatattattccttaactaacctacttcttctttcctttcttttggtatcgaaagtgacaccccctcagaggtatctatttgataatctttatttgatatcttgttttgaaattataattcattttggacatgtcgcatattaacttatggacatgttgaattataattttcaattcaagtatatttgattgatatttcaaggaggggcagactattccaccagatccggctttttaaagtacctgtcgtttagcttaaacaatgacatgtcccgtagagtcggaacattatatacccaagtatactgtagattatatgttgtaagtcatgtaaactgtaaaggcggcttatacatttatctattcatactaaggtgatggatgatgaaatacttacttaagacatacgacacatcaaatttccttgtgagatcaagaaattccatttacaatttctcttccctgtactttcccagtttatcgatgtagtatcttttcgaaaactttctcttatctctcccccccatctctcctactatacacaatgttcagatcaaagaagacaccatcagagagagaaactcgtatactgtttatgcaagatatgtataaaaaaatcactaatgcaaattggactgcaatgagtcttgaacaaaatggtcattataaacatgctttaatgacttggaaagatttaaatatttatacagatcgtgtagttcaaacacttaatgaagaaactattaatttaactttatcaaatgatgagaaaatcttactagatgaattaaataaactacgagctgaaattgaatcaaatttcattggatcttcaaaggcaatggaaaaattaattcaacaacaaaatcaacgtgaaattgaattagagaaagaaagagaaagggaaagagaaagagagagggaatttgtagaatcacaacaaattcaacaatcacaacaacaacctcatgtaccaactttgagaagtaatataccacatacaatgaatacacgtaaacctggtttaaaaatgatgaaatctttaagacctggcggagtagtttcttattcttcaacttcaagtataccgtcaccttcaaactcacattcaaactcacattcaaactcacatcaactcacacacattcacattcaaataccaatacaaacacaaaaaactcctgctcaaactgctgctaatattatatgggcaccatcaagttcaattaatgttaataatacgaataatacaagtactacaagatttaccatcaattgaagatttaacaattaatgaattttcagattttagtggaccaggatctgcaattatcaataaaaaaactatctcatcatctgatagagctaaagctgcattaaaagcttcagccgctgttaaatatccaagacgtgtaagaggtggtgttaaagatatgagatatgaaactagtagtgcatcaccttcaccaagtagaaatttaataaaaagtgataaacaggataaacatgaaaaaattgacaaacaagatagacaaaataaaaaaattgatgttgaagttggagtacttgatgataaaaaagaagcagtagttgaaaatgataacactaataataatgataatattgaagaatctgaggaagatgccgatgaaaaacttttaagtaagattaaaggggttgatttaaaatttgctaaaaatattttaattgaaagtaatagagatcaagataaagtttattgggatgatattgcaggtttagaacaagctaaagaatcattaatggaaactgttgtttacccctttttaagaccagatttatttataggattaagagaacctgttagtggtatgttattatttggtccaccagggactggtaaaacaatgttagctagagcggctgcaactgagagtaattcaacatttttcagtattcaatcatcatcacttacaagtaaatggtatggtgagagtgaaaaattagttcgtgcattatttcaagttgcaaaggcaaaggcaccatcaattatattcgttgatgaaattgattcattattaggtaaaagatctggagatggagatgatgatacaagtcgtagattaaagaatgaatttttagttcaatggtcggatttatcaaaagctgcagctggtagaattgatgatgataatgaaccaccagcaagagttttagttttagctgcaactaatttaccatgggcagttgacgaagcagctagaagaagatttgttagaagacaatatataccattaccagaacctgagactagattagcacattttaaaaaattattaaataatacgaaaaattctttaagtgaagaagatatgaaagaattagttgaattaaccgaaggatatagtggatcagatattacatcattagcgaaagatgcggcaatatggcctataagagaattaggatctaaaatgctggcattgaaagaaattgaaattagaccaatgtcacttgatgattttaaacatagtatgaaaaatatacgtccgagtgttaaccgtgaaggattagctaaatttgaagaatgggctaaagaatttggatcatcaggggcataaggggtgaattgatccagagtatttattatttatattgtattaatatttcaataaattgtaactattgtataagtttttttcaattacttaattattattactaattcgtttaactaacaatttataaaaaaaaaatagataataaactttcaattatagcattaaaaaggtatgaggtagttatgaaacaatcagagaataatgtccgtagtaaattagcaatcttataacaatagaaatacaataagaatttaattaaaatttgggcattcggatttagtaaaatagatcggctttgatataaaacgcgtttaaagtttaccttttcagacactctattcttcaaattgtgcgcgtttgcctatattatattttaatctctattgtactataattcactgaattggtataaccatgtgtttgtccgacagggttatcgtattattaaattttgataagttttttcaaatttgtaaattggaaagttgacattataaaaatatcaggtactgccccttaaaattgatattcatatagatttaataaaaaattttcattcctttggtttcctattttttttttgcttcttcttgtttactcttttatcaaatacttttaaattgacaatgtcctccttatcactttcagttttatcattagtatctgcagcacttgcaacttactccaattctactgctcctgttaattttgtcactggtacatatcctgaacttattgaagttggtacatatgcaaaatgtccatcattaaactttaattttaaaaatcatggttcttacccacctgcaagtgcaagtgttgtctctgcttatcaagttgatgaaaatgattatgaaattacacttcaatttagtgcacaatattgtccaccactttctaatttagatcaagctgcaataattggtgttaattcacctgaatcatcaatttattatttacatgattcaaatcaaaagattagtaatattgcagattcatgtgattggtcagcaagttttgttgttacaggtgctgaaactgatggtgttgtatgtgttccaaatttccaaattcattattcttggttttcaggtttagcatcatcatcatatgcttcatcatttaaatataattcagcttatgaatatgcaatgaattgtgttcatgataataataataatgcacaatctgatttctcacaatactgtttcgcagttgattcagttccagaatcatcatcttcagttgcatcttctgcaattgaatcattatcatcatcagttgtatcttctgcaattgaatcattgtcatcatcatcatcatcagctattgcaacagtcgcaccatcaactatttcagttccaacagttgaaccaaccacctcttcatttattgatatcccatcatatgttaactcatcaattccatcaactacattctcatcatcattaactacaattactacatctgcatcaggtaataaaaaatcagctgaactttattatcaatgtggtggtattaattggacaggcgcaactgcttgtgttgaaggtgcagtctgttcatcaatgaatccattctactatcaatgtgttgctggtccaactcctactactactactaaagctactactaatctaccacatcaaatacagcaattccaacaactactgctctattatatggtcaatgtggtggtaataattggactggtgcaacctgtatgtgttgacggtgcagtttgttcatcaatgaatccgatatgtattatcaatgtgttgctggtccaactccaactactactaaacatactacatcaaatactgcaattccaactacttttgcaccattatatggtcaatgtggtggtaataattggactggtgcaactgcatgttctcaaggtgtttgttcatcaatgaacgatttctattaccaatgtgttatgaccgcttattaaatccaataacaaattctacttaatttacttcttaagtaactgtatacttatttaaaacttctaatcgataccgttaatttaccttctttcttggctataaaattacaatattaggaaaactcaacatcaaaattttaaaataatttaaatctatgttatgtacgaattgggtgtattaaatgaaaacgcgttctgtcaatgattatgtcataagcgctcttatctcggaaccttttcctatttgggctaccaaacggatttactcggaatttaattatcttatcagataaggcattatcttttaactgtcaaactgatagcattataccaatttattgctgaataattcaatataaattgcacgttagagtacctaaaaaatccatttgatacaagctgctaatccctctctgcatttctattaggcaaactaagtttattgaaaagatgactgttgcattatatccttatccaaaagttagttctgaattaggtcatgttgaaacctacaaagattttgctccaactcataaaattccaacaaaaacaagagaattagagattaaatcacttcttgaaaaaattacttccaacccttcatttaatcctaatcttaaatttgatgcttcaaaacatatagttttcgatccatcttattataaatcaactaaaacttttactcttgatgatttgaaaattaataaaactcatgttccgagagttacagattttggtgctgcatttcccatttcctttattatcatctgaagctgttgatatggtcttatatgaagcattacaacctgaaattattgaagattatgcacgtttaccaaatcttgctaaaggtgcaactagattagatttccatattggtggtcacgctgatgatcatgctccatttactgatgcattaattaaatcacctgaaattgcagaaattgtttcaaatttctttggtactccaatgtcagttatttataattcagagagagctcatttaaatgtttcattagcaacaaaggatgaagaagaaattgctaaatatccaagttcaaaggaagaaattatgcaagctttaaataatcaagatgcaggtgatggtgatgaaattccttcaactttaggtcttcattatgattcaacaactgttgccttagttgttatgttagatttaccagaggaagcagttggtggtcaaacaactattataacaggtgatgaaaaagttgttcgtgtacctgaacctaaaaaggttatgcaacaatgattcaaggtcgtgttttaaaacatttagcttcaaaacctgttaccaatcataatagaatctcatttgttaatgggtttgcagttacaggtcctgaacaattagataatgctgcacttacatcaactaaaccttctgttttaccaagagctagatatgatttattctatagagattgggttgattataaatttactcatttagaggaacatttgaaatatattagagaacaagttgaataaagattttagagatggtaaaggttttgatcaagaaggttttgttaaaaaatgtcttaatattgaagaatattttaaaaaatgttatgatgaaatggaatgtgttaataatccaccttacccttcacctcatttcaaaactaaatatcaagattattaattataagctggcttattatcattatctttttaataaattttttactattctttttacctttttaattccttggttttatattttttataattaatacaatttattcctatatcatatacactaattgattacttacttaaagtccaaataagaacttaatggtaataagtaaaattgcaattacacttgaaacgtgtactccccaccatacatgaagtagattaaatctacattctgtatagtcaaattcccatttagttgaatctttattgaaatgacctgtcataataccctgtattaccatgataatcacccatgattgatctaacagtaatttcacgaatccatttatcactatcaatactctttgatgcaacccatcctttctcttcattaatgaaactataataattatcacatccataatgatcatgtccagttaatataataccacttttaccatcaccaaaaacagcatctaaaacacgtcttgatacatgttcagataaatgattttgactctttaataatccaactctatcaggactacatccatgacacccactttctttataatattcaaaatttggtccatcatgacataatccagcacgctttatacattggtatatgtgttaataaaattgaacttccactatatggtgtcttttctaatgttttaataaatttccaagtatattgtttgaattcatcttgaagcattggtccctctaatgataaggaattaagcataactattctccatggatgatcagtatcattatcatattcaatgataaaattagttttaccataaagtttcatccatcttgccatatgctggaaagttgtatcaccatatccaatatcatgattacctgtaatatttaaaaataatggctcagtattataccctgttttaggatcaataaatttaccaccataccaatcataaacatctttgaataaatagaaatctttatcttcaaatgtaccattattattcctttcataaaattcattcatatatttatgccaatcaatattttcgtgtttattgataatttccatctctgctaaactttgtccctcaggtctcttgaatgatctttgtaaaattcttcttgttctattgaaaaactcactatctccaagccattgtgaagagagtaaatcacccattaatacaacataatcaggttctaatttattcttcatagtatcataaatatgccccagaaaataatcatttgcaaaattatcagccattttagaatatggagttgatggccaattaccattgatttgtggatctccaattgccatcatacgtatatcacgtggattctttggtgaatcaacctctttaagaaagtattgtttgtataaatccccaaaatatggtaattttagtaaactattcttcatatggtgttagattatcataattgtaatattcatgtgaccatgaacacttctctgaattcaatgatggatatgtataaagatatatgttagatacaatggctagtatcgtaacaaatgctgtaattttgctgaatttagtcattgccgtcaaaagaaagtacatattgacattgataatgttaagcttttacccacttaattccaacacttttttttcatgggccctctccctctttctcgtgtggggactttcccaattcaaaaagttagttatagtcttacaatcttaattattatatagtttatattacaaatacaaaacgtttcttttaaatacatgtacaaagtatctagtaccttccacctccatatccaccaccgtatccaccaccgtatccaccgccgtatccacctccatatcctcctgcatatccacctgcgtaattatttgagtatccaccaccgtaacctccagcatatgaatttgaatattgttgttgacctgcaccattgtaatgaccaccatttgaagctccacgattctgtgatccacctgccatttgattttgcattaatttcttgaaaccattacataaatgaaccatatctggataaatatttttatgaagcatataaccatttggtaatcctttaacattccatgtgtatgttttttcagtattatcatttaatttgaataaaaggaagaaataaccaggagttttacgattgaaacagaaacaataacatgctctattaccgttagccttagaatatcttattaaccaatcacgtgcatcacttgcaggttcatttctgaatttttcatgattcttcattaagttcaactttattatgtaattgattgatatatgaaacaattaattcatctaaatcatgatatttataatctccaatttgtaaagttttaccaagtgaatattcatttgccttatcaaattcttcaatatcaatatgttgaaataattgattatcaactttccatgtaatagttaaatgatcattacccttatttgatggtctaataacaaattcaccattatctcttgatgcaagataatcttcagcttgagttgcatcaaagtttctgaaatatggatgtttcaaaatacgtttattacctttattttcacgcaattctgcatcacgttctctcttaatatcagcattttcagcttcaaaattccataaatctgcatgacgatcaccttttttattggattttgcacgtacaatatcttccttcaataatgaaaattcagctttaaattctgcatgatcaacagttttaacaacagcttgaactgcttgaccaatattatatttagctaacaaacttgaaacatcaccatatggaactgcattagctcttgaaacatttcctaaaataccattttgagtaatacataataaatatctattatcaaccctttgaataataattggaacaatgacacctctctcaaaagtttcagatgtttcatttgttaacatctcaaaaacttcggtatcagttaataaatgaaattcttttcttaattcttcatagttgttttgcaattcttccttaatcatttccaaagtagctcttttacgatgaccatgttcttctaattgtttggcataaccttcaagtaataaatcttccaatttcaccacaccttcatcatataatttaccgataacaccaccactttctgcttcaacttctgcacgatcttcatcttctaaatctaaagcatcacttgtcattttacgtgccaaatcataatcttcaggatgaatacgtgttgcatctaataattcaatatctttatcaaatttctctggaactggaatttcaataaatggtgcacaattcatgaaaatatttttggtgattaattgcttgataattaagtcatctcttctaattaacaaaccaccgtttgcttcaatacccttaatcaaattacttgcttttcttggacctaaaccagcaatatatttcaaagattgagctagatatgtcgacctgacagcatcattaattttaataccaactaaacatgtaatatctactaaaatagattcaattgctgacattaatttatgttctggcagtaagttttgatgtttatgaatttgaattgatgtaacagtatcacctaatgatatatattctaataatggactttgaacataacgagcaatagaaatacagaattttgcaacaacaggtttatcactaaattcttcattagctctatcggaatattcatataatcttgcagcttcattttcaacataaataacaggtagttcaacttcattttcagattttggtttaacatcttcttcataacgattgtaatcatcttcatcatcaattgaggttttcttattattgaattttaacaatttcatgaactcttttctttaattgtgaacatgaaacattataacctgaaacaccaataacttcaggcttaaatctatcaattaaatttaataattttctcttcaaattcaggatctctgatgttttcatcaaatttgacatgatgagaaatagaaccatcaaaatctaatgcaattgcaataacagcagaatcttttgcaccctcaccattagttaatgctaaaacacgaggagtcataccctttctatctttatcaggaacaaaaggtgcttgatcaactttatctaaaaatttatcacgaacttcaaaatataataaacgttcacaaactgtcttaattttttctttgactgataaaataacattcggtattaaaattttaactgcaatatctaaacattcacgtcttaatttattccaagcaattgaattctcagatgcaccatcagatgacataaaagtgaataaatgatcaataaatcctgaaaatgatgtctttaaaccaattttgataataacataacctaaagattcagcttctaacatacgtaaaaatacatcaggcttataataaaatgagtttggatttctattaatggcatacttgaaatctgcgtatggagaactgtcattgattttagtacgacccttttcagttaattcaatatcaatattagagtattgttcaaatgtagttctgaaatgagaacgaatcttaggattatgaactaattgttgtgcaaacatttgtttaatagcattcatggcaccatcagtcgtactgaaatatgattcagataaatattcagctaatagtttttctggagtttctgtattatcatctgttaaataaattttagaatttgaaacaatattttcaccaattttttctgcatcaataccaatttcttttattatattgtacactttatcactcttgactctttcaaataatttgaatctagaatgagttttctttttcttatcggtagttgaagaatcgtcatctttttctttggcattttttaattctaaactgtaagtgaattgaagataatcgtataaatcttgtaaatcagtaattgtcttagctgtactaatacattcatcatataccaaatcaacagtatctatactcttaaataaattgattgtagcttgcctcttttcataaacaccatggtagtcaatgtcaagttgtaaaattctccaaagatcattttcacttaataatttagtggcttgaatttcattcttttcattatgagtggtatataatgtataatctttacgtgcattccagatagttggaacttctaaattatctcttgatatgaattcaactattttcgcaactgatgctttgaatggttcaattaaatgttgattaccttcttttccaaaaaatgattctttttcagcaaataaagtttcagcaacccaattttgtttatctttaaagtcagaatcatttaaattatagtttttgatattttctcttaaaagttgataacgttcaggtatatctttggatctaataatatcatcattatcagttaataaatgttcttttaattctgtatattcgaaaatattttttaatacatttttttccttatttgaactggatttttgaacaacattaccatcttcatcatattctaattcatcattttcatcatcttgatcatcatcatcatcggcatccatgacatcctcagcttctagagcccaagcatattcttcaccatcaccgaaaatttcatataattcatccagtttatcttgatcgattttactttgttgagcaaattgagtttgtttagctcttgcagatctcatacgagcgagcctttcatctctatcttcatcatcttcagaaaattcatcatcttcaatgaaatcatcaaattcaccagctaaattctgttgatttaacatacgttgttgtttttgctttaaagcatctgctaaatcatcatcttcatcatcattttcgccattcaaattaccactatctgcacttctcgctctagattcatcatcatcatcatcattatcatcatcatcttcatcagagaacatattagttaaaccattggatgctgtgttaccatttgaatcatcttcaactcttttaagtcttttgaactttgatttttcactcaattcacttgaaagttcacctgcattttctcttaaaagagctaaatcatcttcatctaattcatcatcaacttcagtgacgagaggaatgatctctatgtcttttcttatgagatttcttagaaccttcgttatcagaatctgcatcttcctcctcttcttcttcatcatcaacaatgaatccttctctaacttttctgatttcatcctcatcctcatcttcatcttcgtcttcatcagaggaatcaacagctgcttttacttttctactcttatttgttatttcttcatcactatcgttatcatctgagagtgcagctgaatcatcgataaaagaagatttttcttttctagaaactctagcaatatcctcgtcgtccgaagaagccattggataaacttaaatagctagaaactagtcttttggggataagaaggaatgaaaaagtggtatagttaacaaatcaatacatactgtttagctgagcattccattttgccttgtttttcatcattatgaaatatttacaaaaattgcgggtaacttgacgtacaatagtcgcgaccttcacgtgggctcagctaaaaatgagaaatttttcagagttatacattaactgttttattttatatcgattttaatactgttacaatactaaggattagttaccaaagtctgggaaaagatctggtaaatctctagagaggttaccacctctgttaccaccccttcctctacctcttccaccacctctgccacctcttctttctttataaatacctcccgatcttctttctggtacctctaaatcctctccattcgcctgaccgacgatcatcgccatatctatcatttctataacgatcatctctgtaacgatcacctctgtatctattgtcctctatgatctctgtaatcacgataatctctagaatccattctgtttctgtaactatcattataaagatcattatcccaacgtctttgatctctataagatcttggatcattactataagcatctctatcattgtcatgagcataaccaaacacacctgttgtttcgacaccttgaccagttataagatctttttgataacgtgcttgtttaattggtgctgtattctctcttgctggtggaagacgtgatgtatcttctggttcaccatgaagtaaataataacgggagtaattcttagcatctttaactttacgatcctttggtgtactgtatctaacttccagtttgataatcttattagattcatcagataagtctaatggttgcatttctgattctttatgttcttcaactgattcaatagcatcggttttaatttctgcatcttcattggaagtttcttgttcttgttcttcaatacctaaaacagtcttttcaaaaactttatagaatgatttagcttcctcagttttaacaactttaccatctttatccaacactaaatcccaacattgtctatcttgaagttttggggcttgtgtgacagctgcaaattgatcttcaatgggaagttctgaaaattcttgatgttctctgcaaatattttcaaaattggttaataataaaatagcatcagctgcaccacgaattgattcatttccaatttgagattccatatcatcgcccttatcgtcattattattatcatttgtactttcatcaacttccatttcattttgagtttcaccgttagtatcaccttcagtttcaggagtttctccatcaagtgctttaagttcatcaaataaatcaggttgtttactcttttcttctcttgttaatttacgattttgttgtctttcagcttcgtacctttgctttgcttctttattttcattatagtcaaagacaacattgatttcatgatcatttatccatttcaatctgaaatccatatatgaatatttctcatgtgttgcaaatgaattcttaggacgtatatgttgttccaaggtattctttaatttgttcagtagataaatcgtccacgcccgataaatgtaatgaagtcaaaattgtttgttcattcttcaacatcattctcaacatctagctgctctgcaatttcttctccttgtaagtgtggaggtaatgtatcctgttccatctttgatcgttcttttaagtagaagtaccaaagatccataaacaataaccatggaatgaaatattaatatagaaaccctcaaatttcatggaaattgcgaaagcgttttgttgatattttatttgcacattttcctttaagtttttctacgactttctttactcctttcttgattctctttttgggatctttcttttatcgtgggctgctaagaaggtgcataggcgtatatctgtagcgtatgtccctgatactttggccccatatagattacctagaacatattctccatcgttcgtggtcagaactaaccattgtggttttttccgatatgtcatagatgaatgtggtgaagtacctaggcaacattttctttatcaagttactgtatctttgtcttgtcttttacataaaaaaagtttatttacattaggcattcggcttgttactataaaagtatttgcatatcctccgaatacattttgaactactctttcaccatcgtcttggaaaagtaactttaaacttccatcgctagacggtccacaatttccatgctctccccaaccccaagcataaactttatgtttgtcttttgtcactaaaagaccgtgttctgtacccacatcgaaactaccaatttcttcttctaactttgatccatcgtacttttgtccataaacattattaccaaatgaaactaatttgttaccagtatcatctttattgtaccaaacgtggaactgaactccacatactttttagatcattaattttaatgtgtttgtcaacaaagaaccaccgacttttattcactccaactgatccgtgtatttcgtgaccacggtcacctatagttgaatgcatatttgtaagtatactgaacctatcagttttgcatctcataagcataatatttgcatctttctcttcatcataaagatgaaatatagtataatctctacccatgcaacaatctaacacaatcaaaccattaaaacttgaatttgataaatcttcaaaagttatctttgttggttctggcacaattttatcagttataacatcaccaaataattgtccctttttattatctccaaatgcaaaggcagaacctttgttatcaacaattataacactatgtaatgaagatctcataaatttagcattttcagaaagttcaatcaagtgtctttctccgttcttatcatacagaaaaacagaaacgttgtttttaactatagctgtaaagtcccatccagcacaaacatgtgtgacacccttttgtactatgtcaaacctctcactatctttagcaggatcgaaaaagccacattgttcccctgatgcaaataaattcttatttttgaataatattaaagaatgattaccacctatggcaatatcttccacctcattgatttactgcaatagaaaacgttggtcgatcaatatcttctgaatggtttagccctaactggccattaccatttgacccacaacagtctatgtatcttaagagaaatcccataatttgccaacaaatataatcagacacgataattaataagaagacacgttaattaaaggttgagaatttttaattttcactgaaataatttaatgcagtatcaattttcatgtttagatcatctctcttttttttatattattatagaaaggaatcaaagccttgaccatgaaaggaaggactaatagagctcctcgtgtcggaacggtaattgaattgctttcaagtacagatgctgaatctgatgtgcagagtgaagttgaggatcaaagtcctgaaattaaatcacgtaaatctaagcaacaaagtaaaagtatttcaagcttcggatgatgatgagccaatagacgctgctgatgatgatagtgataactctgctgatagcaagaaagattcccaaaatagtggtgtggaagtattatctgatgaagacgaatctggagatgaagaaaaccaagaagaagatgatgatcaggaagatgaagatgaagatgaagatgaatatgttgaacctaaaaaaaccaaacaatccaaacctacgcaaactgcagttaaatctagaagtagaaggttatcttatgaacgtaaaaacaatattgcagatgaaactagtctgatcaaaattgatgatagtgatgacggtgaagatcaagaagaaagcgaagaggaagaacaagatgatgatgataacaatgataacaatgaagatgatgacagtgacactaagagtgatgaagatgatacatctatgattcaagtacctaattcgtctccacaaagatgttcaaagcatcatgccatctgaactggattcatccccacctgcaaaggttactaccaagttaccaaagctacgttcttttgaatataatgggagtccatcagactcttcatattctttatcatcaacagattatattacaatgaaaaaatcttttccaaatttacctgctggtaccattatgaatgctttgaaaaagtaccaaactatatccaaaacttatcatcatttgaaaagtcttgaaaggccatctagtaagtcgtcttctatgcgtttggacacattaacaagcaaaagaaataaaattaacttatctgattctccaattccaagtatgaaaccgtctgcaaaaacattgattctgaaatctgaaagattaaagaaagaagaagctaaaagaaaaaaattagaacaagaaagagcatcagctagaagaaaggcagaacaagagaatattgtttcttctaaggttgtgttggatttatccaaaaagagtcttaaagatagatatgtttcaaataggtttgcaaatcgtaaaaatgtaattcatgatgacgaagaagatgacgaagaagatgaaaatgacgaaaatattgattctgatgatgattcaattgaagaaatttcgagccctcctccaacttcaaaatcgaaaagaaggtatgaatacgatgatgattatgaagttatcttcacgtagtaaaagatctaaagcagttaatagatctgtaagagcaaacaaaagaagctgttgttgaagatgatgatactgatttattacttccagaatttgagataaataaagattcaaaccttaatattactcaaaaagttatgaaattattcaataatgcagacattagagatatcattgatattagtaatatcaaacccgatgaggctaaaattgtttttgatagtagaccatatcgtttaaaatctgaactaattaaattaaatgtccaacctgataaagtcaaaacaaatagatttagaaaccctatggagagatattttgaaactgctgaacagaaagttaactgcttaccttgccattgatgatttattaaagcaatgttttagttacagctaaatcgattactacagaaattaaaaaatggggtattaatttgaagggtaaaattttagatggtgaaatagcaataacaaacgtggaagttgattctgaagaagaatccgaagacgaatctgagtcttcagatgaagaaatcaaagaatccaaaaagtataacaagaagaaatttagaattgacggttcagaatttgacgatgatttttcaacaagtaagaaaaaactaagatacaaatcctagtttagataatagtaaagctaaggataaaatagggtattttaataaaaagccagttttactgtccgatgatatttcattaaaagattatcaacaagttggtattaattggctccatttattattcaaaaagcaattatcatgtattttagcagatgagatgggtttagggtaaaactgcacaagttattgcatttttatcacatcttaagaaaaaacgttaccctggtccacatcttcattgtggttccatcttccaccttagaaaactggttacgtgagtttgaaaaattctctcctactctgaaagttataccatattactggttctgttgatgaacgtgaagaattaaaagcaggttttatatgaagaagaatatgacgttgttgttactacttataatttagcagttggtaaaactgattcagtatttttacaatctatgaatttcaacgttattgtttatgatgaaggtcatatgttgaaaaatgcaatgagtgacagatataaaaagttagttagacttaaggcaaattttcgtttattattgactggtactccattacaaaataatttgaaggaacttatttcattgcttaatttcattttacctgaaatttttgattccagtttagataaattagaatacttattcgatcaaaaagcaacaaccaagaccaatgaagaaaaaattgaaggtaaaaattataacccattgatgtcagaacaagcaattaacaaagctaaaattatgatggcaccgtttgttttacgtcgtaccaaggcacaagttatgaaagatttgccagaaaaacatactaagattgattactgtgatttagttccttctcaatctaaaatttacgaggaagaactggaaattgtcaaacaatttagaattgaaagagaaaaaagaaagcttttaactgatgaagagaataagaaattagcctccattagctaaaaagtctaccaatattttgatgactctcagaaaagcatgtatgcacccattactatttagaaggttttacacagatcaaatgttgcgtattatgtctaaaaaaattatgaaaaatcctacttatgaaaacgccaatgaacaatatatttttgaagactttcaagttatgacagattctgagataacaagattttgccataattatccgaatgaattaggtaaatttgttttaaaacaaaatatttttgaagagagtggtaaagttaagaaattagttgaattattaacagaaatgacttcgaaaggtaaaaaagttttagttttttcattgtttactcaaatgttagacatccttgaaaatgttttatctttacataactggaagtttttgagacttgatggtagtacacaagttgatacaagacaaacaataattgatcagttttatgatgataaaacaattcctgttatgttattaagtacaaaggctggcggttttggtattaatttggtttgtgcaaataatgttattatttttgatcaatcattgaatccacactgatgataaacaagccgaagatcgtgctcatagagttggtcaaactgaagaagtttttgttcatagattaattgctaaagattctattgaagagaatattttacatttggcctttaataaacttcaattagataattctatgatggctcaaaatgttgaagatgttttattgaaaaccgttgaagatctcattgtttctaagaactctaaatcaaaaaataaagttaaagaggttaaggatgaggctaatactgatgagattaaaaatgaaaatgtttttgatgccttcgaagctcctatttctgaagaacttgctgctgctgaagcgattgatgaaggtattgaaattactgatgcaaaaacagttggtgaattgaatgatgcagaaaaaaatggtggtagaaaacgtcgtgctagacaaaaagttaattataatgaaaatggtatggctataaatgatgatttacttattgaagagactactgaagaaactgaaaaatacaataaatctgagaaaaaagatgctaactttttctcctgaagcatcaccaattgcagaatccaaggttgtgacacttagctcctgctttagaaaaaactaaagaaaaagttgtcaaaaaagttggaaaaaagaaagctgacaaaatgattgctgatgcaaagttaaaggaagcagtcatcaaaacgtttgatcaaataaatgcactgcaaaatgcagaaaagaattcagaactaaatcaactgcaaaatcctgtacaaaacattgtatcgaacccagttttaaatacaggctcaaaactcattaccaaattcaatacaaaatgtcaacacaaattacaccacaaaatacatctgcacacacagtatgttaatatacttccaaaaatgattgtcaataaagatattaaaccttctggacacatattgctccagctagtccgccaaccgttttaggttcaattagacaccttcttaaggaaactacaccattagatgcaaaaacctggtgctttcgatatctcctcagctttgaaattagcaaaagcttaatgatgttgtaccaaaaactaatattgtgaatgatgcagttattatacctacggatggtatgaatgcaacagttacaccaaaaaataatgatgccgatgataaagttgttgcaaaaaataaagaacttgcagatttgactagagtaggtgctaggaatggaaaatgctggcaatcaagatgttaaaccaatagagaatgacaaatcaaatcaatgagaacccaccattaccaactgctacaaatgaaacaacaaacgaagtcaaaacttcagaagcagcagaaaatttaagtgaagatgccaataataacaataatgtcatcaaaaactgatgtcaataactgaacctacacagaaacaaataacatctttaagtgatattataatagctagtcaagacctgagagataattcctaaggtgattagaatagtaaattgtaactttgtaactttttgtattatagataataaaaacaaactaaattataaataaatattctacagtaaatattttctatgcaatatatgaaaactcaactccatactttaggattcttgggccagaatccaatcctttcatatctacactaacaccagagctgacgaaaccaatcatagaacttttccttcccatgcaacacgcatattttgcttcgtaatatttccactgattttaagacttgtgatatatgcatcttcatcagaactttctttatactcagataaatctttattattttccttagttttgttaacgacaattgaatcattgaaagactcattggcatctagcaaatttatgttattactttcagtgtattctttatcagaaaccttgtaaacaacattttgtttcccaatatgaggcatgtcatctgtgatttttggactgttatctataccatcagaggtatcacttttagtagcacccctttcatcatcattctgttttacttctgataatttagatctcagcatttgagcaccaacaattagatcggaatcatatgagtagatattaaactgatatttagaacttaatacaatacccatcttggcaatatatgaagttagtttattttgactgttctctggatcatttatactattagttttgaaataagcatcacttctaatcgcataagtagattcaaatgtacctaatagtgggttgacagcaaatgtgaaggttaaagggtgtatacatgatatagcatatgggattgattgtatactttttataggattcaaattagagtagactgatggtagagattttgttaaataacgcatcgtatcaatataagttgtgtatcttgaagcaatactgacacctggactaacactaccaacggagtaccaaagttcacatcctaatgataaagttgaaggattcatttcagtataattttttcttatttttgaagagatgtatgtagacttgttgattgggaaagttgatggtgaattatctaggttaaaatggtataaacatctaaatccaaataaagcttcacgagtagagtaaataaaatcatgtgagctattttctgtttgtctttgaagatagaaagtgaaaatagatgttgtttgtgttaatttattcaattttggtgtattgacaaattttacaatcagttgatgattaggagtaaatcttttaataatcattccctcaatgaattgactaggaaagtaaattttcccatagagtagaaacggtttatgatcaatggtatcactatgagaaatctctttagttatgtttctgtaaccttgtaatatattgtttaatggtaatgttgatgaaggtttgtagtatttatccagatcagttgatgttgaaagataagacaatgaaccttcgagacgttcgatttgggagatgttgatagaactataattgaatttggtatttcgatttgacgcaattatactaaaaccattaggtatttgaaaatgaagtagatttctaggagtttcaagaatatgttcataggtattatcccaagaccatttagtagaggaataaaaacaattctgtattaaatccatataagaaatcattggagtgtttaaaaaatagctcaaaatagttgaatgatatcttatctaccacaattgaatactgtaatagagaaaagaaaatattgttcaaaggaaaacaagtaattaaattgaacaaatatggtatcgattattaacttaaaacctcagttgatggcacaaaaggtaccggaaaaatttagtgaggaaatttggtgacgttcctttttcatgctgaattttagccctttatcaaaattgctggcgaattcaagttctgctggtgtgttttacagcatttaattatccattgcatagactcattttacgtatcaataatggagatacaaagtatacaacaagataagaaaactgagagtgtaagtgaaactgcaaaccatattgaaaaggttgagcaacccagaaaggaaagtgttaccaaacaagtagataaagcaaccgataacaaaatcagttttggtatgaacatagaacaagatcatattgatgatattgatgatatacaatcaccacctaactcaccaggtttagtttatcctgctgttatgtccaatacaaatgctaaaattgactttttcgctttagaaccctagtgataaacctgctgagcctgaaatttcaagtcttacagagaagaaggaaattgataattcaaaggagaatataactaagggagtagataatattagccgtatttcatctgtcacatctacatctattccaaatattaatataactgcatcctctgactcctacttttcaagaacaaggagaacgccatttgagaagaaatcacgtagagcaagtgatatatctgatagatccgatttttatggaagtgtgggatctgttggaagctttgatgggagctttgatactgaaagcgataccgatataactggttcaccatctgttaaatatatgagaagaaaaaccaatagaatgtatgaatctcaataatggcaatggaaatcacagcaataatactgatgttaatcttaggataggttcctgatactgaaaatgaaaagactccaagtaggttgaacttcatcaggtagtataaaacaatttgatgatggtatagtatatcgctacaatttcgaaacatttcagaatctgatacaggatatgatacacctagatcaaatagatccacatatacaagacgtaagtcgaaggattataccaaagataaggaatctattaatactgcacaaatatttaagaatttactaattttagaggagagtttgaagcaacaatatgtagaacaacaaacattaagatataaatatagtgcatttttgattgttttattagctatattttctttttccacatacaccagtataacaaggtctatatattcaacggatgtttttgtcactaatattgatgatcaaaaaattgatgaactatcattattataatgaagatattaaaaatcataaattggaggaaggtatacaatagagacagctgataaattatatgcaacaaatttaccagattttcctacactgcctaattggagtgaagaacaagctacaagtcttactgctggaacttttaggtgataaaaacaaatatgattattctgattccccctataatgatgaattagaattaaatgataaagacgcctctgagtatgggtactcgctattgaatattataaatagagtaatagcaatcataacgggtatgacattagtattgttttatttaagtggtgagtatactagaactataagcaggccaagaaagtttcttactaatgctaataaaggtatcagacaattgaatgtacgtttagttaaaatgaaagtaccaattgaaacaagattgaaggctattttaggtatcctgggtgtcaattcacatagtgttcgtcttgtactgaatcccagggtctttaccactggagtgagagagcaatgggagctatatagaggacagttttggactctgcgtgaaactgttgaaaagaccggttgagcctcctataataataaatttacgtaataaggaaaattttattaaaaaaaaaaaacgggaattttgaaaaaaagcattacataatttctcactaaaaattttcattggggatacatttttgacagcatcgagtcgttactgtgatctatacactgcgggttttactttttcttattgtgttttttcccatcagacgattcattttcggagaagttcggattgctattctatatatttaagcttagcaagtggttatattcaacccactggtaattatcaaggactaaatctatggcaagacctcccaattcatgggtctgggagcatttccaagaagatacctcacaagttccaaatgacgcttatacatcagttaaatgcaaagtttgtaaaaaatctttacgttattcatcaagaaatggaccaactaatcttgctagacatttaacacggtctcattcaatgcatgcaccagattctaatattacaagacgaccttttgaaccattgaattctcaatcacattctaatgaacgtgttgaaaaatcagggaacatcacatgatcactctcaaccatctattacagctacaaattctgatgtttctgttcattctattgtttccaataataattctaattatacacaatctaatgtaactagtctgtctaacttttctaataataatacttctaataataatattaataataataataataatattgacaaaaatactaacaatgataaaatatctgataataatactaataatgataaaaatactgatgatgatgacagaaataaaaacggtgacaataataatagtatcaccaatatgataataaagtcatacagaagcctggatccaagcacacgaaaaataaaatcagtatttcggatatcaataactcaactgataatattatatgcttgagcaatcagagtgaatcaaaaaaagaaaatttcaaagcaatctcagaatcaacgggaatttatcaccagtgctaaatgatacactgaataataaatcacctccaattattgaatccacctgctttgaatgattctcatttttcattaataacaccttcaaggtataacgataaagtgaattttgatcatggaaaccatcaacaccaacaacaacaacaacagcaagacattttatttcaaactccaatgctgaataaaaaaggtgctattattcgtccaagtagtagaggtttaaataatgatatttttctccaaacaaatcaatattctgatatcaatgccagtaatcctccattacttatttctcaagattacaacaaaacatcagctaataggtctgattatgatcaatttatgaaaaatgttaatttgttgccattatatagaatggaagttggaaaatcgtccactcaacataaatcaaaattaatgaaaaattcaactttagataacagaaacagttcaacagatattttgttgaatcaaacatcttcttcacctagtcgagcaccttataaattcaaaaaacaggataacacaaatagtcaacaaatattacaagctcaaccccaattcaatcaattatctcctaatgttttgaaaattgccaatatgacaccacaaaaggcatttgaaaattcatattatatgggacaaccaccatatttgtcaccattacatgtgagtcaacaaagtgaaattgataataaggcaaatgatgttgaatctcgtgatttatcagcaactataagtgaaaacagtaatgatggtgataatatatatgatagacaacaatcaaatagtaatagcaatttgaaatcaggatttcaaaatgaaaacaataagtctgaaaacatcaatactagtaataaagatttaaattataactctagtttaccatcatttttcaattctaatatacctgaagtaaatatcaattcaagtagtgtttcaccctcaacacgtagtaaaagccatgaaaacgttcaagggtatgcacataagagtagtggttctaaaaatatagataatgctaatactggttatgatggtaatggtagcatcaacaaaggaattgataaacagaaaaccaacaatcagcttaagttaagattcttacaaatgcaaatgcaaaaacaacagcaacagcaacaacagttagaacaattggaacaattggaacaattagggcagttgaatagtttgggattagctgggtttgggcaatttgatcattttgatgaacaattgggatttataggacaaactaatgataacacagatatttcgaataaatttgctaattttccacaaatactttcaaaaaatcccgttcaacaacaagtaaactcgaattcaaggacacaatcacaatacaacacaatggttgaacaatatactgagaataataacggaattgatttaaatttagtttcgggaaatgatgatggcatgagtagtcgaaacaggaaaaaagtctccaatcatacattgttgagaattgtcaaagacttacaaaaaactgtttataaactcgagagtgttgtagctgaacaaaataaaggcattatcgaattgaaacaacaagttgctagaaacgttaatagaacaagaggtaatgggatgaaaaaagggtatgatattttgccatttgtttcaaccatttcggacgatactaaagagagtaaaagtggtgatgaacttcccaaactgaaaaatattattacattattcactttaacaactcatgaagttgacgagtatttgaaactttatgatatttcaaatactgacttcaattcggatgatgaggatgatgaaatagttgaaaaggagttggatacaagactcgaactaaataatataaattatagagataaaaatcatatatttcagctgggcaaatttattggatgcaagaacatcaaacgatattggaaagtatatgctgaactttagaaaaaaaacaacaaacaactgcatattttatagacgacacatattttatagttcttatacaattttttttatacaaattttaattttatacacataataagtttaacttaattgaatttattgttcaacctctctacctacccataaaacattattacacctcacgaataattcattctctaattttgtacctttggatagatcaggttcttcaccaagtgattgatcaacttcaatgacgtctttcccaagtaataaattcatataattatctattgatactagagttccatggtattctgttcctgaaaacttcaatcgaacaacaacttttttaccaactaaggatgttaagaatggcttagggttaataggttgaaatgacattgctccagagatctgtaataagaactaagactgatggcataatcatgtttctaagatttgattgcaatatttttagtgaggtgagattttttttaagttctttactattagatatttcaatctttttaaaaatattgataaaagtttgtcttttcaaatatatagtagtataatataataaatatataaaataaatataaataggtatgtctgtaaataatataaatacatgcacgattgtcaaaaatctagaaaatatggaaagtattttactttataagttccaagatgattaagtttgaaaaaaattctacttattaaggaagaattagaagtgaattgaaaattaaataaaatttttagtaatgtattattatatgatggaagtttttgtttcttttttttagttattataaatggaatgttatgattttaaatttgataatttgagaaaataaatttaaagttcactctttaaaggaacagcatcgacatcaccaacaacaacaaggttaaaatcagctgggacagaaacagattttgcagcaacttctttacctgctaagagggaagcaagtttagaatatttggagaaatcagttgattttaatgcctttgcagcagcagagatgatagttgaaacttcagaagcatttggagaagtaacagaaaagtagaataagtttgaaccttcgtaagataaaacctttgaatcaacagttgctgagaaagattctggaactgatgaaattaaacctgcagcaactaattcataagctgatgcatcttcaactggtaaaccaataacagcagaagttttacctgcttgtctaattcttgattctgcaccagtgtatgttggttgtttttgtgcaataacatcgttaccctttggtaatgaagcaaattttgattcagagacgattttttctaaatctgctgcattgacattttcaccaatgatttcaacgttttcagagaggaatgcttcctttgctaaagtcttaatatcttcattagtgtatgattttgaaccatcgtagtataatggtaaaccaagaccggatctataggaaacggcatgtaattcttctaaagctttaaattctggatttgcggattcagttgcgtaaacttgagatgcgtaaggacctgcaatttcatttaattcatgtggtttgtaagcagcatcagaaagagtggatgctaatgagttaacaaagaatggtaaagattctttaaggaaagttgcttttaaaacaagtgcatctctggtaacttcagcagagtattcaccaccaagaagttcagcttcacgcttgagtcttaaaccagacttttcagtagtatcaaggaatgcggaagttgaaagaaggtgtgctaaacctgcagaagcagattttgaacctgcattcttaacaacaacttttaatgaagagactgattcaacagcgacaggaacagtcttaacagaaacagcacgtgcagcagcagaggaaaaatgtctagcagatgagaacatgattggtaattgatgtgttgtcaaatgataatatactcaaagtttcaaaggtttatattcaattcaattcaatattaacatcaaatttccataagacttagaaattctcactgtaccactattagcaaacaattttttggcaattccgcgactctgattggttcctcttttagaaaaaaatggggcttcccaatggggaaggtgcgcaacctaaaagcatgaatttttacaattaaacaggaattactttttttcttatttactcttttaggaagtattatgttagataatatatttacacatttttaaaaatcatcaccaaaccagaagactccacccatcgctctaagtctttgaaatttcgctaatgcagttttttcactctccacaacttcttttaattgttttaattcactttctaataacaactcagcttcacgtcctcgcacatcctctctactgatcttatctaaaagaattctgttagctaatttggtttgttcaagttgatctaatgcttcacccatattaaacatcaaacatttacctaaaatactacgaccacgcaaatatttcctgtttattttaaatgcgaaaatacttctcatagcattacgatcagcagtacgtggaatttcttgaatttcaacaagtccaaatttagtcaaagttgcaatgatttttctaacatcaccttctctcattaaaacaaattttgcaatatttttctcttcaatcaatcttttatcttctatacaattcaagactctcaatacaccgttacccaaaacacctttgattaattgtttcatttgatagtctacaacttgcaagcgtaattctgtaaatggaacatagaaatgacctggagtagtttctctcaaaaacatcatctttttatcagttgttaataattttaaatgttgtagtatcaacattaataactcattgttttctgagttatttgaaagatcgaacccgttatctgcattattttgattttcatcttcgtcctcgtcgtcatcatcttcatcgtcaaatttaatttgtgatgccagtttactcagtttagaacgtttagcactattaccattagcattatcttcttccagttttcttttcttggcatttttttcgtattcatcatcatcatcattattgattgttccaatcaaatcatctctggtcagttcatatttattagacattgataattcttttaatatatcagcagcaccaaaattcatacctttttgttgatctactaaacttaatcttttctttaattcttcgcctatacttggatcataaccggatgtagacgatcctcccactccgacacttacatcagcaacaagtttatcaacaatattttcaatacttctcacatctctagattgtttttcaattctattcaatacaacttgataaattaatgcagtaatattaccaattctatgtttacaaattgagattaattgagtatctctttcatattttaaaaatctttcaaatgataatgttaatggaacactaccattcaatcttttcaatgatttaacaccacttgttccaccattattattatcatcatcttcatcatcactaaataaagttgaaacccctttagctatttcaatatctgtatcattcatttgatttctcattccagttttatgtaatttatccttaccatcattatcaacaaagattttcaacattctttcctttgctaaatctttaataataattgattttttcaactgactaatacctgcagttttgaatcttggattacctccgccatttccaccatcatcaccagttttcaaatattgttgactattattagtaaattctctattagcatgtctaacacattcattcagtgtctcaattaatggtttaaaatcaaaatctttaacattaactaaccatttatcatcaactaaatcaacgaaaacttgttcaattttttcaatttcactctttaattgtatctccttaacatacgctccaattgttaaatgaccttttaatataacattttgtataacttctgcatgtaatttactaaatttcttacgtacatgtcgtataatatcatcaaggtatgttaatttccaacaaccttcctcattatgtgaataaaatacattgccacttcttgaatcagtaatatatacaacacaaccaagttgaattagtacaactaatatttttttcaaattattacccttgattcctgatttttgtgataattgttgaattgaaattttacgatgtgcatgaataattgagtaaatgtatgctgcttgttctccaatataagctcttagaattacagaatgaagaaaacatgatggtgactgtgtttttgccattacaggcaattctgtgggaatcttagtaccaccactcatctttgcttatattacagatcaatgtaataaatacacagtaaacacaaattttagaagtgatttcatgaaagaaaaaaaaaatttggaaaaaatcaaaaaaaaaatctgagggtttgactatagaaggaggcatagaaatgtggttgttgctgtgttttttttgttgttttttatatattttatataccgttttttatttttatagaattatataacatagcccttggttcaccagttgaacagaaaatgcattaatatttattatgtgtataggataggataaaaaaaaattgggtttggtatggtgacaaaactgaaaaatgcaaacactaaagaaattcgatgaaaatatatcatctaattggtggcatatcactcatttcgaatagcagatcatcttcatgataaattccttgatgttccgcttcttcatcatgttcattgctattcatttgtggattgtattttatcatatccatattcatatttctgggtacagtattagcatgatgaatactattattattgaattcatcttctataccttcatcctcagaatgtaatctggctctaccagtattgacactttggcgtctttgtttgtttcgcatgttattgagaatattgcttaatgatcctctggttttcttagaatcatcacgtaacataggtctattttgtggtttgcttggtgaatcatcaatctcatctttacctttaataacatcttcttcatcgtcatcatcttcatcatcgtcctcttcttcactttcaaaaacttgttgacaatatgacatatctttcaactgatctggagtcatgttgcctgtaatattatcactagaattacctttaacttgagaacttaaatgacttctttccttaataccttcattcttgaaactattttgtaaaattgtacgtaattgactacctgttattgaacctcctgaaccagttcttgatcttgaaattgcattaacagatgtagaatttacactaacactcagacttctcaataaggagtgagcacgaccaattgaacctgtacgattgagattatttgcttgattaaaatcactatgattggagcctttgaatattgatgatgtaggagatggtgattgatagtgaggattattggtagcgttggaactagttttatcagtactattattgttattattattcatagttgcatcaatagaatttattcctgtagcaatggcacaggatgtacttgaaactgtgctagatttaagatgagaatgtaatgagtttgctgtaatatgatttggagtacccacaattgagttaggagaataagatgttgaatgttggataataccaatacttcctctactatctctactacctctgctatctctactattagcacgaactcttgaatataaaccatcatacattacattcttgtctaaagatccataatttgtagaggagctattgtttgctatattattacttggagattggcttcgatagaagttgattggagcagaagtaacataatttggcttctcagatactgctagattggtatttagatcagatgtcactgggtattttgtattcattaataattttgcgcttgactcaatatttctattcatttgatgcggtggtggtgaataggaagatggtgatctcgaaagtatcatactatctttagaattgatgaacaaatcattattctttttcaaatttttgtaattgctcaagttgtcatcatatatcattgaagaggaattatttgaaatctttaaatcaggtttagaatcaagaaatttcataaacgttgataaatcttcatccaagaataatgggctattagtttctgaatttgtatttttgatagtttgtggttgaatattggtaagtttactgttgagattatttgtcattaattgaccttcaacactgttatttctactggaactatttttgaatcttgatccaaatgatgaaggaaattttgatgaagaggaagttatcagtgcagcatttagattagtagcactatttttgtccagactaccattataaaaatgaatactggaacctgaatcatttcttttcacgggtataggagttgtgttgttataggggtaaatattctgtggtggtgaagaagatgcgacggatccagatttaaatatagagaccgatctaccggatggtcttcttttagatgatatgctgttaattgaagtacttgatgcacggaacttaacattgcctaaattagaagttggtgaatattgttgttctgtaattgaaggtttttttgattgagaagaattacttgtggtattatttttatcattatcttgaacagctgtgtttgcagaagttggagtaattgtactcgtagcaaaagagttagccttctccttttgtttttcaaattggaaacttagatctggatgatgagcatcatatgtgaaatgagaagttgtttcataaatgtgaaaatctgcattgcatctgtaggataccgatatctctaaagctccaactggggtaattatagattgtaattttctggaattaattgtatctagttctggtttataagaaattaaatgtcggctcagaccgtaacgaccttttgaaatcaatggttctgagccgttcagtatttttgttttaaatctaagtttggaattaattgttttattattttttttgaaaaagtgagcaactggtaatgatgttaaaaccgtttgaaggcgatcaaaatttttagtaatatttgaactgatgacagttagatccatcatttcattatcatatgtttcaaggtctaaatgaaccaaccatctttccaagacaatttcagatttcttcttcctcagtatgagttcttcttcgatatataattcctgagaatcctcaagatttgataggtccaaaactgtttctattatcattggtggcaaaattgtgatatcacgattagtccatggctttatcacgtctctataagtttcatcatcatcatcccaaggtacaacaacatcaagccatgaatcactatcttcaatttcatgaacatgacccatttcctcatcaccgtgattcaaacgattatcagtaatagtctgagccgaccttgagaaaaaccctcttatcatctcagctaacgcgtcagcgtcaccatttgaaagccaccgggacctcccctccttatcgggcattatagatgggttatacaatatttatattgtttattggaaagggaaataaaatccaaaagtttaagaagaaaagtggtgtatacacacatcaaaatagaattatgggatatgagcctcagtattatgagtcttaaatttagaaccctcgcacattccgtcaaaagaagttttgttatctaatcagagacacagcctggctttggctgtatacgatgagtttatacagtatcttatcttataaatacttctaaattctatatattttataaaagacatccaccaccattgagaatgagtgctctctgggtttctcttaaacgaccggaggctgcatatgcttcactgacagaaactgcggattctgttttagaatttactgctaattcaagagaaactgtcttatcaagatttctccagacgttgacatcacctggaaacaaaatggcctgtctttgccagagttttttaccaaccttgtctaatactgacagaattgcaggaacttccttatgtgtatctgcaatcaatgtctcaagtggtaattgttgtaaaacttcttgaactgcttccatgtattctgaccattcctctgacaatgacattgctgcaattgtcatacaaacaacgagtgatgtaccatgttctgaaatatgtgctaataattcgtctaatgcagcttgtctagtttctgtatcatcaaatgcatataaaacttgtgaaactaaaacaacaatattctcattctctgggaatgcatcaagtaatttcttaaattcaactaatgatttatcaaattctccttgaaaatacaatgataatcctaaaacactataacatgaaagtaaacattgttgaacttccaatgttaaatcttcaacaccttcaattaaaacaccaatttcttcacaaacatcataagcaactttatattgtttacttgataataatatacgtgaatgctgacatttagccttacaatatctaatcaaattcttttcactatcattattttcatattcatcttcaagtaatgaacataatctctcagaatatccaatacctttattaaatgaatataatctttcaataacctagtaaacttaattctaaggcaaattcgtcattagggtataacttcatataattcatcaaaccataattaactgtagttaattgttgaacacattctaaatctctttcatcatgaccttctccaattattgaatcaagaacagaaacagcgtataataaagtattagccggctcacttcccttagaaagaacataggaatgtgtaaataaattattggattctaatgtctttccttcctctttattaattaatgcttgtccaatccatgcaattgaagtacccgcagcaagtgattgacatcttaagaaacattcgtttgcaagttcattatcaaaatactgtaatatataacataccaagattaaaccaatatgttggtgatttagattcaattgaaattgccttaataaagcaatgttgagaaattttactattcttatccattgttaaaattcccaaataattccagtattcactattatcaggttctaatgaaatcgctttatttgctaattttatagataattccttgtatttagcatctttactatctttaaaccatgaaaagaaagaaactgataagttgaatatcaaactggagttaagcatacgtattcccttctccttaccagctaaataaccaccaatacatgataaagtgacaaataaatgtaataattcaacatattttcctcttgcaatcaattcaggaatttcataatcttcagcattaaactctccccataattcacctgattcaaatatatctttattaaaaatgctactgattttttcatatggtaatctatcattagacattcttattttaagagcaactgttaatgcatcacctaaacatttccataacttgattgatttattttcaagctcaaaagattccaataaatatttaaatacttccaataatgtatctgatgctctcaaaattgcacccttattaatttcagcattacatctcaaaattaatgtttcaattaataatgtcaaaatagagatattttcactctgtgaaattaataaattctgtaaaatcgaaacacttctttcaaattcaagcatacttgttaatgatgttgctaataaatatacagcatgccaatcagcattattttccatatcacttgtaatttcagcttccttatcactaacattatttgctaatcgaataacatgttcgaaaactttaacacttgcctctaatctaccacttgaaatatatgattcacctaatccaatccatgaagtaatatcaaatgaattcatacgtagagcactttgaaaatattcaattgccttagtatcattttttgcttccattgacgcacaacctaaaattctatacggccatgatttatcttgtactttattaaatgatgaatttaattgtctcttagctgattcattttcaatgactgctttactgacaatatctgccatttcccaatcatcaatagatgtgaaatgttcagctaatctatatgatgcctcaatttctgcaggatcctaattgaaatgctttgtaaaaacatttaattgctctatcttttttattagagtaattatagtacattataccaagtaaagtaaaagcagatgcataatttgcagatattttcaaacatttcaaattgtattcaatacatttattcactaactctttgattttctcatcattatcattagtaatatcgttatcaagctcttcgatttcaatatgatatgagattgcttgcctgtacatcaatttagaaattgtattcattaaagtagcactacttgaactgttctcttgatttgcatcttgaatggtttgaattgccttttgtaaatattcacgtccaatatcaaaattctttaattgaatttgacaccaaccgtattcttgaatagcatttgtattatttggatctttattaatcagatccataaaaatatgagatgcttcttcaaatttatttgtttcaactaaaatcaatgctttaccaattctaattctatcatcatcgggatatttactttcaatggaatcatataatgccatagcttttggaaaatttttaggagattcatagtaagtgtaaataattgctaaattcaaagtttgactcaatttactattaggaatattcttggatgttttatatttcaaatcaacagttgctctagtaaattgtgtagaaatatcaagcccaagagcatattgtttaagatgaatacaatactcaagcataattctattacaaataattgaaaaagtatttttttcgattgcattggacattgtagttaagacttcctgtggtgatacattaaatatctcatatctttcatcttcttcctgtgtttccttttcattttctttatctttcttttccttagttccctttttaagcggatataaatagtccaaaaccctagatttttcgaatggagaaatatcagaaatcaaaaattgatagaaaatactaccaaaacctctctccttaccaaacagtgatatataatttgacaaattatctaactctaaatcattcaatgtagttggatcaagccaatcaaagtatattttccatgctaactcagaaggacatttagttaataccaaaccatcaacaaaatcacttatttcatctcttaatgcaggtttctcgggtgctggtgcagctgttaataaagaatacttatatcttagaagtttgtcttgagcagaatatctatcattatcattgtgttcaagatttatcattaattcatataatttagatatttcggagcctgaaataattggccataccgcttcattatatttatttaattttgccttttcagtcatgttaattgaaaacttcatctttactttatcctttgtctttttgacttcactattttcttcttcttcaattatactaataagtttcttcaaagaatctgaaggtttcgcaatattgtatcctataatatcacctaattcagataatccaggtataatttgtctataatagtatttcttcataggtgtaaaattcaagccatgttctttaatatattcatctatgtatataacaacttcggtgaaaggttcgtttttagattgtagtaatttggcaaatttagtcaaggtagtgaaaaatgcaacaaaatcagaatctttatgttgaattgataattgagctttccaagataaaacgctttctggatcaatttcgcttgccttaatgtaacatttcattgcttcactgtcaatcttctttgattgatatgatttacctgcaaaaatgtatgcaaaaaaattagatttgtccaatttgaaaattgatttacaaattgacaaacattcatcataatcttcattaacaagctctttctttgcttgttttaaataagactgtattttctttttagcttccttgtctgacattgaagcgtttccctgttgaaggcagtctataacggccaaggcaaattaagagaagacacaacttgctccaattgaaacctccatgaaaaaaagtagcagtgggccttgaaatttgacatgtcgcgttgaagttgacccaggttatccagtatatagccaatgccttccttgcttggttctctcttggagatcaagagaatgagtgggggaaacaatgcaatggagttatctaaagatcaaatacagaaatatagaatgatgtttacaatgattgatcaagatggtgatgattttataacgaaggatgatattaaggctatttttaaggatctaaacatggaaattgatgaatcaacaatcgatcaagaaatgttagcaaatagtaatggtaagttagactttaatgggtttttgaacgttgttaatcagaaaattaaaggattcagtgattcggaggaattgaaggatgctttccaaacatttactagtgaaggtggtattgatagtaagatattaaaagaaagtttacaatctgctcttagtgaagaatcagataagaatgctgttaatcgtgtggtggaggaatacaccaaggagaacaagattacaggatttcagaaattcaatgctgataagttcattgatgatgtcaaaaaataaagacatcaatagagtatgttatattctatatgttaacaatcttttataaacattttagttgctttgtttttttctttttcttcttctaattacttttgatattatatgttaaataatagtattatactagtgtacaaaatggatggggttatctgtaatatattatttttaattatattatcatttttttgttctttgatttttatagttatctaatcgacaattaattcatcaacactccagtcttcatatgaaccatctggaaggtatcttctaacaacaagggggattttcttagcagataattctttcattgcgatttgtaaaggatcagtttcaccttcaatatcaaccaatacaggtgcattcattgatatttgtaatgctctagtacctaaaatacgtgctctttcatatttagtcataaatggtgtggtgattctttcttcctttggaatagctcttggtttagctcttttaccaacttgtaaaggacctgatccattatcgtcgagacctgatgtgatgattaatcttccgtcttggtcaacttgagtaccatcgttattgttaatgacatcatcatcattttggaaacgttcatcatctgaaaaacgttcatctccaccataatcctcaccgtagtctgccatgctgtgtatctcttgtaggttatgttaatgaacaactactgtaacagtaacaagtcgtcttagagagtggaaaaaattttcagatttctgtgaggaacatgaaattttcagctttttctttttcttgctgtttctctattaggaaaatttaaatttaaatttttttattgtatttttattttttagacttatctctttgttggatattgtctgattagtacactcacccgttggaattgtgcgttggaaatttgaaaatggacatttcatatttgttggaatcaagtaaatccaggaaaagaggtagaagttgtgcttcctcttctgaaatgactatatctcctgtaaatgaaattcacgataaggatgaagaaatatcggcaatatcaaattcaaaccaaccaattgatcttgctaaaccaattgaagaaactggtaatagagaaaagataatcccttcaactccaccgcgttcaaggtcacactcagcatcttcatcgtcattttctcaacaaatgtctccgagagtggggagacgatattctaatacatctgcatcatcaagatctacatcaaattcaagagcttcatcaccaagaccaaagaaatatctatgtgaattcccaggatgtgaaaaagcttattcaagaccttcattattggaacaacatttacaaactcattataattatcgaccttttaaatgtgacttccccgattgtgaggagacatttgctagaaaagaccatctggaaagacataaacttaaacacttaagtgaggaagagaaacctttccattgttcattttgtggtaagggagttaattctagccaacatttgaaaagacatgaaaaaactcatttaaaatcatttgaatgtccatatgatgattgtaatgaagcatttcataaacatcaaagtttaaaggcacatattcgtaattttcatgaacaaattacaaatttccatatttgtaaattatgtgacaaaaagtttgatcgtccaggtagattggcaaatcatatggaaaaatatcattctgagacaccaaaactaatgtgtgatttccctgattgctataagacttttagggtttggtctgcgttacaattacatattaaaaatgatcatcctagacttgaatgtgaaatttgtggtaaaaaatgtcttggtcaatcaggtttaactaatcatatgaaaattcataatgatgaaactgtattaaaactttggggatgtattgattgtggtgaaaagtttcaaaagaaagatgatgctgttaaacactatgctgaaaaacatccattaattacattaccggaagagttacaatacgttatcaaggaagaaaacgatgaaaagggtgagaaagagaaggaagatttggttccattagatgaaaatggtgaaaagaaaacggttgagtattatatgagaaagaaggaggctgaaagaaaggaaaagaagagattaagagaagaaatggaacaacagcaacagcaggaagagaaagcggaagtgaaacaacctggaaccagtggtcctattgaagtagctaaaagcaagaaacaaatggcagttgaatcattcctatctgaatgtggaatagttgtttccaaaccaactacaagtgaattcaaaaagcagcagttggatagagtaccgtcatctcctgatgttttagatatgcttatagataatattgaacaaagactcacttgtccttacgtttcctgtcatcggttgtttaggaaacaatatgatttggatagacatcttcaatggcacacaaaacaagatgaaattatggataaaagagttgacgttatcctatccgaacttgacagtaaatcatcatcaccattatccaataatacccctactaagaataatgaatgattgtagtctgctttttaaacatatttcattgtttttatatattatatcatgtatattatacattattgtacactaattaactaactaatttggattacttttggtatcttgcatttgcttattatgtctttccaatttactattgaaaagtctatttttttcatgaattgcaccttcttttccttcatcagaaatcttttgacgtttattataaaccttctgttcccatttattgactttatcgatatattctttcaatttttcatttgatgtcaaagcacttcgtatttctgcatctgacaatccttgtgctttcattgattcatactccttcttttctttttcataatcctcaatagtctttctcttattttcttcctctagttctctgatatttttggagtaagtattagctgctagttgtttgtaattttgtaattctccattatcagtatcaattgattcaaaatgtctttttaaattaccttgttttatttgccatttatcgtcttcctcagctgtatattccaaagctgaaatatcagaaagtttactcttctctttcactataggtgtatcatcattcagtgaaccgccttccttttcttcttctctgtctgctaattcctgaagtttcctcttctctgcaagtttcgttcgtaacccactggcttcattatacacttctcttctattatctaaaatagcactggccctttcacgtttcagtctctgtaccttctccaacaggctttcacttttctctatagatgtcattggttgatcaactttaatgaataaaacacttaaaatatgataaaatcaatactacaaattttcgcataatttattatattgacagatttatcgatatacctttaattcaatgtctaaaatcgttaaatagtacataaaagattaaatacttatataataagtacaaactaaactgttctaagctttctagcacgagacttttcacttggtgttaaaacccattcaattccactttctgcatcttcgaaaatggccatttcttcttcatcctctaatcctacaactaatacaatctgtgtaattttaacaaattcggatcttaatccgtagttgaacttacataattcactaatgatagtactaacatcttgttcaagttttgtagatcctgcagaggaaactttcttctctaattgccatattttattctctaataatacaatagccatttcaattattttgacaattaatttgttaaatactggatttgataatgttgtcacaaatggtataattatggaattccaatttttaataaatgcaatcatattactatcgttttctaaaacttttgttgttctattcaaattattattcactccattagcgttgttgtttatattattattgatttcttgtctgaagtattgaccatcttccattgttaataagtaattactattcaatgaactgtttaccagttttgttattctagatttcaagactttttcaaaaagaattttaacactgttattaattatggaatctgttctttccttgaatgcagttggaacactacccaataatccatgaatcttctcaaacattaaactttcatctggtacataaacatcaaagtccttattcagcaatttattagtatctgataaactaatagttttcctgatattaattaattcttgatcattcattatcaataatgacttcaaattactacttttcatacatgattctaccaatttgtctaaatacgttcccattgcttgcaatgtatttaaatagataataaaaggtttaatgtccttatcatcaccgataaggtatgattctgtatcactatccccagagacggtatatgaaatcgcagcattcaaacctctcataaacattgcaccagtattggcgatatccgatgctgaaacattgattgcattaggtgttccacttctcgatcttgaatcgcttgatatgtttttaatttctttgttatatgaatgttgatcatttggtttatatattgactgtattgtttcctttgtaagtaaatttgaatttgttctcaatgataatgatgaaagtctttgtttaataatatttaagaagtcattaagtaaaattctctttatatttgatatcatgtttttaatagatgctaactcgcccgttgctagaacttccagaaatatagtattgagtacaattaccatatcgtcagctaatgatgaaattggtggatcttcgggtatcagtgttaataatgaatttgataatgaattgttggtatttttatatacttgagtcaaaaactttaaacaagtggaaaaatttgattcaggactattcaacgattcaattgtacatgctttctctaatgttcttctaattatgtaagtacaacttgtatcaaaattgcttacaagtttatcatgaacttttataccaaatgatgaaaataataatggatttggataaattttttcctctaaattatttgaatttgaatttgaatattcattccaaacaacaacaaaaaatttggaatacattgaccaatggctcatcattgcagataattcatcggtaacttgtgaaatttcctttaattctgcagatgcaactatttcttgttcatcttcctcttcctctgattcactttctgctacgtttctataaatttcctttattaatattggatagctgtattgttttaattcactgactgttctttctaaatgttttacatctgaataagtttcaaatatcaaattactttgtaaatcacattctacttgaatatcttttaaaatacttggaacaacatctttaccataataagattttataacttttgaatgttgattaataatcacagatagtgtttggtataatgtgaataataactgtgcgtatatatctgtttttgattgattgttttgaacacttctgataatatttctagattgttcacttattataccacatatgaaattagagtaacatttcaaaccaatttcttgtttcccaataagagggaataactgaaagaaataagtcaattgggggacatccttctttacagctgcattattgaatttttctacaaatatttgctcaagctcattgatccatctattcaataaatcttttggtaaatcttcaagtgtacttgttggaactttaaattcaacatatggatcagttatcaaaccatccggtaattctctaatagtaaatatggattttgatgcagataaccaatctttcctttctattgctaaatgtgtgttgtttagttcagttttcaatgttttcacattatctacaaatgttttaagtttgatgagttgtactttctctgaatctaatattctaacattttcagtaattttataacttaaagaatttgcattttccatgatacttttcaaagatcttgattgattcaatgttgatgaaagttcaactcttgaaatttccaatgatctgatagttgactgttgttgaaatatattctcatttgcataattttgtagtgttgaattgatatcatgttgtgtagtatttatattcatttagaatatctgggaattgttttatatttgatgaagtatttagtgaagattgtaaagatttgattttattagataatgtttccatttgtgaatcaaaatcaaaatcatgatctaaagatgatccattttgaagttcatttatagctaattttgacattatgaacaaccaattatcaaattcaaaaacaaaacactataattccccaataacaatggattcgcactgtctatcaaaccagtgataaacctgtttgttgtaaaggaaaccgtgttgtcatcaaatcgataattcaatctcgaaagttcaccaattttcaaccttctctcttcccaatgaggtaatgttagaatttttgaaaatttttttcaatttcgacactcttcattatcttattaagagtctgtttttttccaactttcaacaacaatatagccaataacactagtacaagatgactactgttgaaaagattaaagccattgaagatgaaatggcgaaaacccaaaaaaataaagcaaccgaaaagcatcttggtatgcttaaggctaaattagcaaaacttagagctgatttacttaaggatgcagctgcatctaccggtggtggaggtggtgtaggttttgatgttaagaagagtggtgctgcatctattggttttgttggtttcccatctgttggtaaatctacattattaactaaacttacaggtacagcatctgaagctgcagcatatgaattcacaactttaacaaccgttcctggtgttattaaatatagaggtgcaaagattcaaatgttagatttaccaggtattattgaaggtgcaaaggatggtagaggtagaggtaaacaagttattgcagttgcaagatcatgtgatttaattttcattgttttagatgttaataaaccacttcgtcataaacaaattcattgaacatgaattagaaggttttggtataagattaaataagacaccacctgatattcttatcaagaagaaagaaaaaggtggtattagtattacatcaacagttgcattaactaaaattgatgatgatgaagttaaagcagttttaaatgaatatagaattaattcatgtgaagtttcattccgtcaagatgcaacagttgatgatttgattgatgtccttgaagctcataatagaaaatatattccagctatttatgttttaaataaaattgattcattctcaattgaggaattagaacttttatatcgtattccaaatgctgttccaatatcaagtgggaatgaatggaatttagatgaattattagaagttatgtgggatagattaaatttggttcgtgtgtatactaaaccaaagggacgtttaccagatttctcagatcctgttgttttgaaaggtgataaatgttcagttgaagatttctgtatgaagattcataaatctttaattgatgattttaaatctgcacttgttttcggtacaagtgttaaacatcaaaatcaatatgttggtttatcacataatttacaagatgaagatgtgattactatcttaaagaaatagaaatgtggatttctggttttactttactattcttggtttgttgtaaataatgtgtatataagagatattggtccttttttttaaatgtttacaaaaatagataatatattgtataagatatttaagttaactttataactatttgtttgtgttaccaccaccattattattactatcagtacttattacactcatacattggaacttatttgcataattagccttgtataatctaatcaaaccatcatcaccacaactacttaaaatagtaccagtaagattccaactcactttccaaacttcaccaatatgatcatttaatgcatttaataaagtaatttcaaaatttattttatcaacatcatctaaatctttcttttcagttaatttaaatattcttacataaccatccttacaagcagttgcaattaaatgataacttctacccatagttggagcccaggaaacactccttattaaacctttatgctcaggtaatactaaaccttgaacaaatttattagttgtttcatttctataatagatataaccttgatctaatgcacttacaagaaatttctcagtactaaatttagatggacaccatgataaactaaaatcactttgtagatgatttgcaacaggatttttcagaattgaaatttcatcaattaatacccattgagataaatcacttggatcagctgattcataaattcttaaaataccttcacttccaattgaacttattcttaaacctaaatgtgaaggtgtgaaaacatgcatcatataggggaccatgagaatctgctaatgttgcaactttagtccatcgtctacctgaattcaatggttcctcaaaatgttcctcccaaactttaattgtacgatcatatgatgcagataatatcagatgaccaaattctggatgtgagaagcatactttaacaataacactatcatgtgctctccatgaatcattaggttcccaaaatgaagtatttgcatctaaatcgaaaaacttttatatgttggtcagcactacaggtagctagttgacgaccatagaagtcataggctacatccagaataagatcttggtgagaggttggaaacggtttcacttggttcattgtgtgtctggtggtgtttactctctggttatagaaaccagtatatttaatttcgtccaacaagtatataaaactaatcaatgaatgaaaacatgtaccaaacacaacagaaaaaactgtcgcttagtaaaaagctatacgagataagaagagctgaaattattttatttttcacttttgttactttacatgttttcttagctatttaaagtcacttgcacgtccttttctcttccttttacctccccgatttgttgtttatatacttctttttcttaattttatactctagttatactaccggacaatattgacaatgtttaaagttttctcacctatcaattcactccttaaagttaataatttacgttctattcggacttcgatccagtcccaccatataaatggtaaaatgttttcaacatctccaattactaaaaagcaaggttttaataattttggtaatttcaaatatcaatcaagatcttatgcacatcaaagagagaaacctaatatgggattaacattcttaggtgttttaggtatttcatcattatacttagttgcacataaaccaattttaaatgatgcaggatttgctaatcctccagttactattaatacaggtaaaggtgcaaatgtttattatgatgatactaaaccaaaatttgatggtgcatttaatggtaaattaaattatcatcaagttgcaatgggttcaatggctggtttgattcttggttatgcactttcaagattaagttcaattttatttgttttcacaattaccttttacgtgataagtatttatcttcgtaaacaaggaattgtcgttattgatactaaaagtgttttcaaaagtgcagtaaatagtgtctcttgggatgaactcgttttcgatcaaactagtttcagtgtaccatttgttatgagtttcttaactgctgctacattataagttagtcacaattagttttaaataactttaaaaacactatatgtctactcttatttttattttccattcttcaatctaaatatatatgctcctttttacatgtgtgtttgatacttgttttttcattattattatactttttatctattttaatgtataaatgaacaaaatattttacaatacttgataacttatggttacaatatatgtctcacatacgttttctgagacatcttctccatctataatacaattggtggaaagagtaattaactctatgttgtttgaacgatttcatcaattgcccatttgacaatctctttaaacaattcatcatccttattctcatccaattcatctaaaactgctaaatcatcagtaaatgaattgaaatcagataaatcttcattaacttccttctttattgaattaatttgttccattagtttattattactatttcgtaattcaattaattcttcctctagtgttttcaattcttcctttttacttgttattaaaaatgctttagataattcagttgatgttaatttagatacatctatacgactaactttacctccattctttatatctatctctttctgtcgttcacccttatcaacgatatcatcaagttcatctaatttattcttcaagtctcgttcaataaatatcttttgaaactctaattctgctctatttttccaagatttaactatttgctttcgtacataatcaagacttacatgatctatttgtggataacatgaaacaaacgttttaagcgtgagtttagataatgttttctgaagtgcatatgaaagtgcagaatgcaatgcctcaaatctcacatgatctttctccactgacattatattgcatgtatattatttatttgatactaaagttaaaagtaatgtaaccagtcttcctttcagtataacgacaacaacaacctcccattgcatgtaaacaaatattcaaatcgcaactactaagtaaaatatttttttttttcaacatgaaaaaaaatttcttgaacttttttctactgtaatctttcttttttaacaaggaaaaactatagataaaatgaagattgttgcatcctgtgaagatactggagctttaaaagtagtcattgcattacacggaactgatacttcatcaaaacctgatgaaaatagcgcaaaaattccagctccaatagtttcaacttctgcaactgaatataatagaaattctaaagttatacatttagttcattcccagcatactggtaatattgttgttactcgtcaaaatggttctgtagaattatatgatacatctgttttaatggaaactgaagaaccacaaatcattgatgaagaaaccaagaatgaaggtgaagatggaaatgcaaagaatattaaagaacaaactgttgaagaagaaaaggaagaagtcgatttattaccaataatatattcacataaggatgttattcccgcatttaaattaacttctgatgatgaaaaatttattgctttaattattgatgattcaggtcgtgttgttgtagcaacaaacaaaggttcagttttcatttggaattcagaagaggaacttaataaaactccacttaagtataacttaccattaaatgaaactgaagttgttgaagcttttaaaatacatccaggtaaagaaaatataaattatattgcatatggtggtaaggaaacagatttaagaatcgttaaattaccagaagttcaaacttctaaatcaaagaaatctaagaaatcaaaaaaatcaaaggaaagtatagaacctgaaattgaaattgtcttcaaggctaaaaatattacaaatagtacattaaatttacgtgttccaattcatataaaggatattttatttgataatgaaagtactccagaaaatttcaaactttatactttcacagtttggggtgatttacgaatttatgaatctaaattaggacgtaaaccaagatcttcaactttaatcttacctaaaaaagcaccaataacaaaagcaatactattaaatgatcatatcattgtttgtgataatagaggaatagttgtaaaagtcgataaacaaacaggttcgcaaatatgtcaatttaagggacaaattggttcaactcaatcattatttaatttcaatgattcaattttaggtacaacaggttctgaccgttatgttcgtgcctatagtgatgaaactagagattgtattgttaaagttttcattaggcgcacaatctaataatattgtaattattgatgataatgaaactttaagacgttctgcaagtaaattaattggtggtgtaaaggatgttgtatcaagagcagaaatgagagaaataagacaaaagaagagagaagaggaggaagaagaaagtagtgatgaagaagaattatggagtaaattagaaactgaagttacaactagaagaaagagaagaaagttaactcttgcttaattttaaaatgacattttttgtaaaaagtttataaaacaggtatagttgaattacttacttaatagttctcctgttcaatcatcatctcatagattagtgatctttttgtacaagtattagtttaaatctcttcaattaaagctttgaatcaaataatttgttagtaatataactgttattagtaatgtccctacaaaacatgtcagtgatcaaaaaatattaacagttggctcttttcaaaaacgactaatttgtcaaattttacttagttgagccgcctattacgtaagcacaaatgtaattacagaaaatttctcttaattttaagtttcagacaagactggatggccaagttggttaaggcgtgcgactgttaatcgcaagatcgtgagttcaatcctcactctggtcgtatcttgcgggttaatggtctagtggtatgattcctgctttgggtgcaggaggccctgggttcaattcccagttgaccccttgattttttttgtcttatagggttttttttttggtttggtgggaagatggataatataaaattgatttcttctcttatgttttaaacactttcttaaaaccgacatttttttacaatcataattcttaatactaataggtagactcaattacttagtgagtttattaggaggtaacaaacgaccactttttttaaaaatctttgtaattaagtaggagataaatacactaaactaattgcaacaccgtaatcaaaaatgaaaactaaaattttttgtaaaattttccttaagggggaatattaatatcaaatacaaaggcaccaacaattattctaaaattcaatttatagcaatcatttattatatcaaatacttttagaattggtttaaaaaaatagatcttgttactaatagcaaaaaaataggttgaattgaggccaacaggaatcgaacctgcaacctttcgatttggagtcgaaagctctaccattgagccatagccccattcagttgttatttgtccctttatgagctccgtgtaactgttttgtactctgcccagtcacgtgataagctattgaattgatgaagcatgaataatatatgcgtataagtaatcaatctgtataaaattgtatattttaatgaaattaatgtaaaaaaaaaagaaaaagaacaataacaaatgttaatttttgtgctaactattaagctcatatgatgtattacaaaataaatgtactgtgtaaaaaatatcaagtcatcaaattagttcaaagagtagttactagtaaataactattgttttttatcacttttaaaagcctttttagggaaacaaagaaggtttttattagttgtaaattatttaatctttgcaacagacaaatagatcattaaaaaattaattattgaataaataaagtttcaaatgtagacaaaaaagatgattaaagttgcacaactgtttagaataaactttcttatgttgtaatctaacgactctttgggcaggatccatattttacaaaacaacagtattaaaagaacaaactatataaactataaaataacttagattatacaaaatgtcaacagattcgatatcaaagctaggaattcttcgttctacttatacttagaattccaatctttactatcgtttctttttctaatttgtgagcaatacttaattctaatcagttttcaaggctcagcttaataatacaatattattatgtattatttagtttcgcttagaattaccaatctcaacatcttacactgagattctgtttgaagtactaaattaagttttaccaactacataaataattaaaaatataagctttgtgacaaaagaacatggaagtttgggttggcactttgtttgtttccacagagctttaaacagaggtgcaaaattggttaatttaacacattgtaaatctgctaaaataagtctaatttcaaataccaaatgttacacaaagaaaaaaaacgtgtgaaatacgatactatgttttataaataaaatttaaacaaatttttattcttgaataaaaatgcttacgtaaacaaagcaacattaagaacttactcttgcttttttgaaactgagaatgaacggccggtgatttaataaggaactacttgttaaaataaaatataaaataatataaaataaagtaaaagaaataagtataataataagtaaataattaataattgtaatttagaggataagtattaagagaggttggcattctcgaagtcaagaatgaattaggataattctgattggttggttacaaccaattaacaaaagaggaaactcttgcgaagttgaagagttaatatttcctaattaggaaagaggggagccggcgaagtcgttcatttacattacctcgcttcccaggaaacttcgtcctcgaagttataaaatttaaattttcatgttgagaattattttgaatttctgaaggatgattctttggatctaaagctcttgcacgattccataatgtagcttgttctgattcaggtaattttgtaaaaagttcaactggaatagaagatgagtgacatggatcacaatctctccaataaacatcaagtgaattatttgtttcatctataccagcaataccaattatttcatgtaatcttgattcagcttcagctaaagttctaggtggaaccttaggaaaaccactatcagcttgtaaaaactttctaaaccatttcacattcataactctatcttttttattcatacttgggagatctacttcaaatgcatttgaaccaatttgtttaactaatttaaatggaccataataaacaggttgaattttataatatttcgaatcatgaccatgagcatctttatgtaataagatccaatcaccaactttaaaatttatttcacttctgtgcttattatgatgaacttcttgttgatgttgtgatctaactaaattatcttgaacttgtttaataattaatttcattctttttgcaaatctagcagccttatcatcatatcttaaatcatgaatagaataaccttgcattgttgaaggactatcaggaagataaccataacataattcaaatggactcataccaatagataattgatgagaactattataagcaaattcagcaacagataaccatttgtcccattcaaatatatcattatttgtataatttcttaataattcatttaatatacgatttgttctttcagtttgaccatcagtttgaggatgattagtagttgaaaataaaacagaagtaccaaataacttattaacagtatgccaaaattcacttgtaaatctaatatctttatctgagaccattcttcttggaataccatgatatttaaaacaattatctaccaataaccttgcacaaccaataccatttaatgttttaacagttggaataaaatgagccatttttgaaaatctatcaacaacaactaaaatcatatcatacccacttctagaaggaggaataccagtaataaaatctaatgtaatatcagtccatctaccaggtggaataggtagtggagaaaataaacctttcttaccatgagtttcagcttttgattgttgacataataaacatctttgacaaaaattctttacagacttcaacatatgaggccaataaaacataccatgtaatctttcataagttttataaaatccaaaatgaccagcagaaggtaaatcatgagcatttttaattaattttctaatgagttctgaattattaggaattgcaattctatttgaaatatcacctggaacagtagtaaaataaagtaatttatcatgcaatctatagtgtttaatataattgttgattgttttaggaacaggtaaattattttgtaatacatcataaatttcacttaattcttcatctttaaaatatccttttataatttcttccttgagttcttcattaggagcaacaacagattcaacttgtgtgataaataaattattagcagaaaccttatatggatatcttgataatgcatcagcaactgaattctttttaccttgaatatattcaattgaaaaatcatattgggataaataatctaaccatctagcaactcttgtactatcaattaaattttgattctttaaataaataagtgatttgtgatcagttttcaaaataaaatgtctattgagtaaataatatctccatgtttgcaatgcttcaacaacagccataaattcacgatcataaattgagtaatttaattgggaaccaactaacttctttgaaccataagcaatgacaccacgagttttaccatcaggatcaacttgttctaaaacataacctagagcactaccacaggcatcagaatgaacaacaaatttataaccttcatcccagataggatgtaccaatacaggagcattagttagacttcttttcaattcatcaaaagcatcttgttgtggtttttcccatttacttttaccagtaataaaattgaatataggtgcggcaatctttgaataattagcaataaatcttctataataaccagatagaccgataaatgattgagcttctttcacagttgttggaattggccattcattaattttatctattttagtgggatctacgtggacacctttatttgatataacatgccctaaaaattgtaaactttgatagaatagtgaacatttctttcttttagcaactaatttattttgtttcagagtatttaaaacttctcgtaaatgttgataatgtgtttcgatagatggagaataaataataatgtcatctaaataaacttgaacaaactttcctaaatatggacccaatacttcattcatcatcctttgaaatgtactcggagcattggttaaaccaaagggcataacaacccattcaaaatgaccaaattctgtagaaaatgcagttttttccatatcttcatcattaattctaacttggaaatatccagacatcaaatctaattttgaaaacactttggctttaccaaattttgaaataatctcatcaattctagggattggaaacttatctttaactgtattgttatttaaaattctatagtcaatacacaacctcatcgtgccatctttcttttttacaaacaagacagggctattaaaaggactggcggatggcctgacaaatccttgggctagcagtgcttcaacttgtttatttaattcaatcttttcctgatgactcaatttgtattgttttcgatacacatttttatttggttcaatcaatataattctatgagttaaattccttttcggaggcaaatgcattggaggatcattggtaattgtgttcgagaactcattgtataatttatttcttaattcttcagtattggcataaggcttttcaataccgttttcttcttctttttcttcattatcattttcaattgagtaaatatatcccattaatattgcattttctttattgttcacatttctttttaattgcctttctgtagtgatgatgtttaaatttaatctagtactttcttcattcttttcgttcataatttcttcttcttccatctcatcagcagtataatattctaattcagtttcattatcttcgttttcgtatgctggtaattcatattgttcttcttcttgtatagtgtatgagatttcttgttcatctttacttaaattgctccaagggataagttctccaaatttaatcataaatgggacaccaaaaataaccttatgtaccaatttgtctaacacataaaattgcacttcttcataatgtttctcatcttttaattcaaattcaattgtagttttgaaagttcctaggcattgaatgttttcaccattagctgcattaattataacggatcgagttaatggaaatatttgatcttgtaatttgttctttttaataaattcaattgaaataaaattgtgggaagctccactatctaataagctcttttgttcgatttctccattaataatcgtttttaaaaataataaattgtttacctctaaatgaatgtttgataaagttaatacaagcaaattcgaattcaaatttgcgctatcctcttgtaaataattttttaagttttttgtataattttttaagttttttgtataattttttatatgttccttttcaataatattagtgttttgcaataaagtttgattttgtggaattgaattaacgccagcaaggcccacgttaccacctgacgtgtttaaaaagcctgagggttggatctttcatcataaccgttcatctcattcatgttgatgttattgttattgaagttcctattaccattattataatttccattatagttattacctctgaaagaattattatttctaaatgaattattatttctaaaagagttgttgtttctagaggaattattataattatatgaatttctagaatttgtggattgtctaggcttgtaatcattgaatctagttcttaagttatcaacatccattggttcgcctctacgatcctcattaaatctatgctttctaaaattaggtttatagaaattattgttcttttctaaatccttggctaaaaacttggcttcattatatgattcaggacgtaattgaaaaattctacttctaatttgaggttttaaattttgaatgaatctatctctagttgcacattctaattcataatcagcaggtaataaagccttaaatttttcgaactctctgatatattgttcgacagatttattttcttgagtagttgcattatatcttgcagctgcacttctaatttcaaattcatcagttggacaatattcttgaataaatgcttctttaaattctaaccagctaggaggattaacaaaacgatgagtataccaatttaaagcagggccagttaattgattgactgcactaacaaccttgtaaatatctaaacattgtttacccatagactcttggcaaataaaattaagctctaatctttttaacagtgcttgagctttaaaaacagagtcggtttctttaccgctgaaatgaaatccagttggcatattaacactggaagtaggtctttcttcttgttcgaatgttccgtaagttgtcatcttttcttttaacactaccggtgctaccaattgagaatgaacggccggtgatttaataaggaactacttgttaaaataaaatataaaataatataaaataaagtaaaagaaataagtataataataagtaaataattaataattgtaatttagaggataagtattaagagaggttggcattctcgaagtcaagaatgaattaggataattctgattggttggttacaaccaattaacaaaagaggaaactcttgcgaagttgaagagttaatatttcctaattaggaaagaggggagccggcgaagtcgttcatttacagaaacataacaagcgcaagtggtttagtggtaaaattcaacgttgccatcgttgagcccctggttcgattcctggcttgcgcagttatttttttagattacttattttttgccatttgtccataaagtgagaaattaagaaaatactgtataaatctgcttatccatttttttaaaaagttgtgccatttatccatcgggaacaagaactccgcaatttttgacacatttgccttagtttatcctaaatttgactcaattttactctccggattgacaaccccgtttgcccgttttattgattattatttaatatcaaattaatataaaataacatgttatttcccaaactctgttaaaaacatcaaattattagttttactatctcttttataatttcttttaaatactcactcaatctaatcaatcaataaattaaccatcttatatacaatgtccgttatcgttaacaacaacgcatcaatcgcaaacaaggaagatcatattactgtctatgacagagaaagaagaatctcaattactgaagaaactagtgatattgcaggacttacacttttaagtaagacaattagttttgaagatgattataatgatgatgaagataatgagtatactacatgttttgttccaactgttagttgtgatgatcatcaagatatctctgtgtacggacacagtatctattaagtcatttacttattatgttactataccccgattataaaatcttttctactttttaatttctacactatatttcaaactctttatatcttttatctaattaattaattccaatacttcttatcaattaactattaataatcccacactccgcacccccaattattacctaattaggcgatatctccaccccataaaatttaaaacaaaatttcagtgccatttcccctgacactaattttcaaaatgattccgaaactccgagatcccgatgattcactatatttttgatgattctttactctattttctgtcaaccatgtccctaagcccttttcttaaaacaatttatttctccacggatcaataaatcacttcttcttcttcttataacttttcctctttctagtaattaataattaataatacttgcttaacttataaaatcattatcaatatgccacaagatccagtagaatttttgaaaagtcaatcaaagggtactttatcaaataccccatctctgagtaatttatataattcacattcaaataaaggttcagatacaacactttcattgtcaaattcagcagttttcactaatggagtaggtttagttcaaaaaggtacaattgctcacggtaataagcatcatctaactcatagtaaacatccagataataataataacgatggtgattctgaacataatacaaataatcatgaagaagacgaagatgatgatgcttttgaattaaattggactcctcaagtatcttctgataattacacttcaggttacattaacaaaatttaaatttgaaaatttacttagatttattattacaccttcttctaaacctttaaaatatttattatcacttaaatttgtattttctttagtatttagtttcttttttatacaaaacttatccaaaaaaataatgaaagattacacattcataaaatcttaattaaactctccccaacaaataaagtatcaaaaaattaagcccaacgcggggctcgaacccgcagccttttgattgctattggttaaatatcaatacttaagagtcaaacgctctaccgattgagctagccaggcttaaaagaaagttccgataccgggagtcgaacccgggtctgcccggtgaaagcggaccgtgatagccgttacactatatcggaaattgttgtttttggtaccctgaaacttagtatactcttcattaacgtatcacgtgacgttgtagttttggaacaaaagatggagtttttttatttaaatatactgtaagtagcaggaaatggtatattcgttattaaaagtgtttaattttaattaaaccaaagcttttaataaaattattacatgttttatttgctcaaatttggagtgtttttagggtatttaataatagtcgaatttaaactgttttagttggagatttggcaaataatttaatactgctttatttaaccgcttttaaattgttatttgcgtggtaaaacaaacagagcatttaaatatctcattatttttttaaggagtaaagtctccaaaccctacactttttgaagtcaaaattatctgtaattacagtattaatttatagccggaagacataaaaagcttacatcaatcaaaagagaaacatgtttgtgacaatgaagtaaaaataattattgattgttgcacttctaaagttatattattccaaaataatacttcattttcccaaaccacccccctaaaaattttgtataattccaaacttcttattattcataaatgagcacaaaagcgcataaagtaatgttacacagacatacaatagaataaacaataaatacactttttataaacaataagataattttaattaaaaataaaaaaaaaattgctatcataaaaactcgggatacttcgcttcttaattaggaaatagattacaaatctattttccaaaatgtcaaaggtgaatcactttctacaggattctttcaattgccgggaagtaaagtgtatttgtaatcagtataatctatataaatataaacctttacccatttagaatatgtggtaaccatgaacttaaactttaattactctttacttttagtatacaaaaaacatctacaaatcaaagcaaatgttaaataaaatcactaaacctttccactgggcaagaacagttgttcctttagaaaaaagaaatatatttgtcgtttatgccgtcattttattaggtacagtccttgataatcttagttctgcatctgctttaacactctcagctaatattcaaaaagaattcaacactgactcatcaactacaagttgggttttatctggttatgctttaacattgggttcctttattatggtctctggtaaaatatctgatgttattggacctcataatttatatttgattggtattacaatcttttggatatcagctcttatttgtgcttgtattccacatacatcaattgttgctcttatagtttttagagctatacaaggtattggtgcatctacattaattccttcaacaattgcacttactgctaattattttaccgggcctttacaaaagcatttaaacacagcagtcatttatatgattgttgctcttaccgctacacttggattaggtgttgttttgggtggtgcattctcagaaacgaatgttggatataaagggtttttctatttcgtttttgcttattcatttgttgttgatgttttacttgttttccttattattccgatcaataaaacagatggtcataataaacttaagatgaaaaatattgattttgttgctgctttcttggttattgttggatgtttattaatgattttaggtttaactgaaggtggtgaaaaatggagatcccctaaagcaattgcaccattaattgttggatttttcacagctgcttcagcattagtttatgaagttctttacataagaagataccaagtactccatcaaaatgaagataaatcatcaagctggaaacttcaagttgatttattattcccaccagaaatcttaaagatcccaaacttttatccatttttgattatttgtggtttatactatgcaacttttgtcatgattattgcaataggtgtttacacttacagtttcatttatcatgattccaatataataacagcagtgaaagttttcccaatgtcaataggattagtttttggtgcaattgtttacagagattcttattacaagaaagttggttataaaagaatgtttattatctctggtgttctttcattagccagtattatttggttctcacgtactaaatttggtacaacaaatgcatattggaaatatgatatgggtgcattattcttatatggttatggaattaatatcttcttcaatatttatatgccattagttattcaatgtactccattacatttacaaggtaatgttaatggtattttccaaacatgcagtcaagttttacttagtattggtaatgcattaattccttcaattgctggtaatcttacaattgcatatacatttgaggaaaaattaattattcaaaataagcttagaactatcttttatgttatgatgggtttccatgcattcattgttatcttaatggttgttgctatcaaagatccaaaaactatatcaagttctgctgatgatgaagatgctattaatgttgaaaatgataatgttgaaaacaatgctattgatcctaatgttgatattgaaaaattggaaaagactgataactcagaatcatctattgaaagttgtgaaatgaataaagcagcatccgttgaatgtcaaactgaaaatctatcaacggaatcaaaaaataccaactgataatttattttacatacttatttttattctactttagtgtttttagttgattattatataattttgcttaatataattttgcttaatataactcctttctcgcctagaaaagtggtgtaagaataaaaaacagacgatagcttgctattattaaattgctacaaaagtaagaagaatgattccaagttcaagattaccacaagatatataaaacatatttgttattcaaatatgaaaagtttaatttttatcaaaactgaggaaaatgaaaaggttaaggaataacccaatagaactaattcgttggtgatttgaccctggagaataattcttaaacatgtgaaaaatccaggtacatgaattttgaatatttgcttatgtaattaactacattcataactattcaaagatctttaaaatcaacattgattgaaagtattacactttcttatcttttttgcaataggcgtgaataaaattacatgaaagagtaaagttttttttacaaaatgtctaatacatttcttttatcaggttttcaaaaaaaagttatctttattttaatatgttttgctaaaaaaaagagcaaaatttgagcacattaaatcataacattagtttgaaaaaacattttcaaccatactttacgctaaataatgtttcagaaacaactaaacagatactaatcatagaaagttgctaacaaaaagtagcaagacggttagcttgaatagtacctaaaaaaagtgccaaaaatcattaaaaactggaaattttatatactttacccttttttaccccagcaatcccaaataaattactaagtaaacttcagacaattgcaaatctaatgattttttaaacaaacaaaaaagtaaaatgataatacttgatattcaaagttataaacataaaatataccattataaagaaaggaaaagaaataaaaattcatgtaataaagtatattcagttagtaatactaataacttccattactgattaatgattttgattgagcattaattactatcaagtaatcagttcaaattcttcatttgattaacgtattcttctaaagaatgtttacctttaacaactgtaacatcatctctattggagagtaattcactatgaagttcatcgtggaattttggtgataatgaagtgaaaatacttaaaattgtatctctattaaatccatatgtttccattatatcagcaacattttcagctgggacataattccattttaagtctggtttattgaaaacctttgcatataatttagttaattcaggaactgtaattctgtcactttcaacataagttgtcttgaaaactgtttctttatccttctttggtggattttcaataatatcactaataacatctgcaatatcatctaatgaagcatatggatgaactttttctgtatctaaaaatgagttaatttcacccttttcaatttctggtaaattaactaataaacctgaataaaattttggtggtttaacaaatgaaatactattaactttaccatttaacttttcctttaaaatttgttcattataataatgaaattctaatccacctaaccctggcttatgtgaaccagctgaacttaaataaacaatattttgaacatctgactcaagaagaacttcagcaatatatttcatttgtttacttgattcttcaacaatatttgcaattgtataaggtagtgcacttaaaacgaaaacagaatctgcaccttttaatgtttttaataaaaattctttatcattaatatcaccaattgctggaattgcaccaaatttcttaatttcctctgctttatctgctgaacgtgtaataacaactgtttcaacaccatctttaactaacttaattgcaagtggttttgcaacattacctgtagatccgaaaagtactgctctcattattgtttcttgtttgtgtttttgttttttgtttttgtttttgtttgttgatataattaagtactatattacaattccaacatttcactaacaatttaatactgagaatacccttatttatatacacatcagagtgattatatggaattcggagtttcaagataatttccattgaaaatacatgaactccgtggcgcagcactataaaacataaggttaatgcgccacaactgattacaaatattggataattagtaatactatgcaatgtggcgcattaaagaagaccctgtccctatcgcactataaatcaataccaatgttcccagtagttcatgggcacaccccagtagctttattttcaaccgccagtaataagtttcagttgccactacacttttatgttgcccagtaaatttgacataccgctgggagtagattaaaaccacccagtagtttgagatttccgccctctggtatctaaagcctcagcagctgcaagttactcggaccctacttttgtcatagcaggaccatctttggggcaactaagtcaaatcatatcaataatcttgattgtagtaattgtgattgttttgcaaagtaattacgatattcatcgttttaaaagttagtgttcataataataacggtgaacttagatagtaatcattttaattacggtggattgttgatagtgattattaaaactttctcaaaatcgaaccgtgaataagataatccctacataattcacttttattaggatcaccgcaacagtttagtgtgatcaatacaaacattaactcaaattacacttattttaacaactaccaccataatatactagttttactaaaatcaacacctcaaattactgtgattgttgtaatcgccgctaaaacttaacggcactatagtaatcacagcaaaacttttgcataattaatccaataacaaccataaaatactgtaattattatagtcactcacatctagggcaaattaatgtaataattacattaataatgtgtgattggtataattacctccatcatttatggtgtataacttaatcaccagtcagaataaatttgtttttaacattgtaactaactgtgatcactataaatacccaaatcccagtaaacttgattacaattagtttaacacaattattaaagttactatcataatttacccttaatggtctatttccattcccatgcaaatgtgattattataatcacagcaattatccattgtgaatatgatgaatacctactttacctgatgtatttgtaatcactgtgtcatgattgatatagccatcatcataactgctttcatatttaactatgttggtgtgatcacttttatatacaactgtaattattataattaccaccatgttttttgtggttactataaacaacgcaaaagatcagcgtggttatagtaataattgctaaagtttaatgtgctcgatgcaataacaaccccaagatactttacttattatgatcactattcctactcactctgattactataatcacacctatctctaagggaaattagtataataacaaaattaattctttgaaattgatataatcactaccatcactttcaaaatattataatcgtcatttgaatgtactattgtatttggtatcataactagctgtggctactatcatcacaataatcacatccaagacttcccgtaaacattataatcaccggattaacttaccggagtaactcctcgtgattaacttaatcagacccccaaataaattaattcaacatcctaacttaatgtgcattaattcaaattttcgtagctaacagtgactaagataactattgacattgcttcatgtgaatattataaaagccagcataatttactattattagtctaattacctttaagttataagcttattaactgtactttccatattgattatagtaatcacaaacgtgactcaatttgaatttcataacttttattttatcagaccctgatttaacagttagcaacatggtgtgtatcatgattatcataatcacaacaattttttattgtgaatatcataatcactattactaagatttaaacacattgtaactacagctggtttactattttagtacatccttagtacatataccccagtatcacctggccagtgtttgtctaggatacggttaggatttgactagggacctggctagggacctgggaggcagccgagtagaatccgggtaggatccgagtatgatccgagtaggaaataattaggaaataaggaggaaataaggaggaaataaggaggatataaggaggatataaggaggatataaggaggatataagtaaggacttggtttgcacctgactacggtctaataacagactgagtaggacctgactatgaacaaaataaggattcgagtagagcctgatttaagtctgactcccgtcggattagagtctgctaagttttagttatataatctttgatcattaaaaataatacaaaataaaatgaatataagatgagaaagcttagacgatggttaacttgattcaactattcatgtagcatttactaaaattagtaacacgaaatcacactatcgacttgattaagaatttgccatccattgcttcacgtcttgcgagattttccattaaacgttccaagaacttccatcgccttctacaaagtataaatttatgtttcaaactcatgctctggttactaattccgtatattaactaatatccattgccacgtaagcaatatctgtcatgaacccaagatttccatgtagcgaggcatatcctcaattctattattacctaatcttaacaataacacatcttcaaatatatcattaatgacagcttgtcgagggcttgtgggatgtttatttcttatttattcttcttagacttacttatgataaaaataaatttgttagaagttcattatacacgggtcatttatttacacaactttattggttggactacgtgtgcttgaggggcatttgtcataattttagtttgtttctagaatctgaggttaattataaaactacaataaataacccttttaaacagtaactaattataattatttcgatgataaaaatgcccaaacgggtaaaaaaggagataatgaaaaatggacggagaacggaaataagaactgtaattacgagggaacaagaaataattccgacttccgaacaatgaaagcagagctttttccctaatagggtttttcttttctttttttttttctttcttttttttttaacaaacacgatcattaatccatcaaagcatttagtataaaagtaagattgcttcccgtgcttgaacatttactatacattctcttctctttactctaaaaactatactgtaatgcacaattcaatgaccgctaatccattagttaaagcgtttacatgggcaagaacagttgtcccattagagaaaagaaatgtatttgtcgtttatgcaattatattattaggtacagttcttgataatcttagttctgcatctgctttaacactctcagctaatattcaaaaagaatttaacactgactcatcaactacaagttgggttttatctggctatgcgttaacattgggctcctttattatggttgctggtaaaatatctgatgttattggacctcataatgtatatttgattggtattacgatcttttggatatcagctcttatctgtgcttgtattccacatacatcaattgttgctcttatagtttttagagctatacaaggtattggtgcatctacattgattccttcaacaattgcacttaccgcaaattatttcactggacctttgcaaaagcatttaaacactgcagttatttatatgattgttgctcttactgctacacttggattaggtgtggttttaggtggtgctttttcagaaacaaatgtcggatacaaaggatttttctattttgtttttgcttattcatttgttgttgatgttttacttgttttccttattattccgatcaataaaacagatggtcataataaacttaagatgaaaaatattgattttgttgctgctttcttggttattattggatgtttattaatgattttaggtttaactgaaggtggtgaaaaatggagatcccctaaagcaattgcaccattagtcgttggatttttcacagccgcttcagcattagtttatgaagttctttacataagaagataccaagtactccatcaaaatgaagataaatcatcaagctggaaacttcaagttgatttgttattcccgccagaaatcttaaagatcccaaacttttatccatttttgattatttgtagtttatattatgcaacttttgttatgatcattgcaataggtgtttacacttacagtttcatttatcatgattccaatataataacagcagtgaaagttttcccaatgtcaataggattacttttcggtgcaattgtttatagagattcttattacaagaaagttggttataaaagaatgtttattatttctggtgttctttcattagtaggtattatttggttttcacgtactaaatttggtacaacaaatgcatattggaaatatgatatgggtgcattattcttatatggttatggaattaatatcttcttcaatatttatatgccattagttattcaatgtaccccattacatttacaaggtaatgttaatggtattttccaaacatgcagtcaagttttacttagtattggtaatgcattaattccttcaattgctggtaatcttacaattgcatatacatttgaggaaaaattaattattcaaaataagcttagaactatcttttatgttatgatgggtttccatgcattcattgttatcttaatggttgttgctatcaaagatccaaaaactatatcaagttctgctgatgatgaagatgctattaatgttgaaaatgataatgttgaaaacaatgctattgatcctaatgttgatattgaaaaattggaaaagactgataactcagaatcatctattgaaagttgtgaaatgaataaagcagcatccgttgaatgtcaaactgaaaatctatcaacggaatcaaaaaataccaactgataatttattttacatacttatttttattctactttagtgtttttagttgattattatataattttgcttaatataattttgcttaatataactcctttctcgcctagaaaagtggtgtaagaataaaaaacagacgatagcttgctattattaaattgctacaaaagtaagaagaatgattccaagttcaagattaccacaagatatataaaacatatttgttattcaaatatgaaaagtttaatttttatcaaaactgaggaaaatgaaaaggttaaggaataacccaatagaactaattcgttggtgatttgaccctggagaataattcttaaacatgtgaaaaatccaggtacatgaattttgaatatttgcttatgtaattaactacattcataactattcaaagatctttaaaatcaacattgattgaaagtattacactttcttatcttttttgcaataggcgtgaataaaattacatgaaagagtaaagttttttttacaaaatgtctaatacatttcttttatcaggttttcaaaaaaaagttatctttattttaatatgttttgctaaaaaaaagagcaaaatttgagcacattaaatcataacattagtttgaaaaaacattttcaaccatactttacgctaaataatgtttcagaaacaactaaacagatactaatcatagaaagttgctaacaaaaagtagcaagacggttagcttgaatagtacctaaaaaaagtgccaaaaatcattaaaaactggaaattttatatactttacccttttttaccccagcaatcccaaataaattactaagtaaacttcagacaattgcaaatctaatgattttttaaacaaacaaaaaagtaaaatgataatacttgatattcaaagttataaacataaaatataccattataaagaaaggaaaagaaataaaaattcatgtaataaagtatattcagttagtaatactaataacttccattactgattaatgattttgattgagcattaattactatcaagtaatcagttcaaattcttcatttgattaacgtattcttctaaagaatgtttacctttaacaactgtaacatcatctctattggagagtaattcactatgaagttcatcgtggaattttggtgataatgaagtgaaaatacttaaaattgtatctctattaaatccatatgtttccattatatcagcaacattttcagctgggacataattccattttaagtctggtttattgaaaacctttgcatataatttagttaattcaggaactgtaattctgtcactttcaacataagttgtcttgaaaactgtttctttatccttctttggtggattttcaataatatcactaataacatctgcaatatcatctaatgaagcatatggatgaactttttctgtatctaaaaatgagttaatttcacccttttcaatttctggtaaattaactaataaacctgaataaaattttggtggtttaacaaatgaaatactattaactttaccatttaacttttcctttaaaatttgttcattataataatgaaattctaatccacctaaccctggcttatgtgaaccagctgaacttaaataaacaatattttgaacatctgactcaagaagaacttcagcaatatatttcatttgtttacttgattcttcaacaatatttgcaattgtataaggtagtgcacttaaaacgaaaacagaatctgcaccttttaatgtttttaataaaaattctttatcattaatatcaccaattgctggaattgcaccaaatttcttaatttcctctgctttatctgctgaacgtgtaataacaactgtttcaacaccatctttaactaacttaattgcaagtggttttgcaacattacctgtagatccgaaaagtactgctctcattattgtttcttgtttgtgtttttgttttttgtttttgtttttgtttgttgatataattaagtactatattacaattccaacatttcactaacaatttaatactgagaatacccttatttatatacacatcagagtgattatatggaattcggagtttcaagataatttccattgaaaatacatgaactccgtggcgcagcactataaaacataaggttaatgcgccacaactgattacaaatattggataattagtaatactatgcaatgtggcgcattaaagaagaccctgtccctatcgcactataaatcaataccaatgttcccagtagttcatgggcacaccccagtagctttattttcaaccgccagtaataagtttcagttgccactacacttttatgttgcccagtaaatttgacataccgctgggagtagattaaaaccacccagtagtttgagatttccgccctctggtatctaaagcctcagcagctgcaagttactcggaccctacttttgtcatagcaggaccatctttggggcaactaagtcaaatcatatcaataatcttgattgtagtaattgtgattgttttgcaaagtaattacgatattcatcgttttaaaagttagtgttcataataataacggtgaacttagatagtaatcattttaattacggtggattgttgatagtgattattaaaactttctcaaaatcgaaccgtgaataagataatccctacataattcacttttattaggatcaccgcaacagtttagtgtgatcaatacaaacattaactcaaattacacttattttaacaactaccaccataatatactagttttactaaaatcaacacctcaaattactgtgattgttgtaatcgccgctaaaacttaacggcactatagtaatcacagcaaaacttttgcataattaatccaataacaaccataaaatactgtaattattatagtcactcacatctagggcaaattaatgtaataattacattaataatgtgtgattggtataattacctccatcatttatggtgtataacttaatcaccagtcagaataaatttgtttttaacattgtaactaactgtgatcactataaatacccaaatcccagtaaacttgattacaattagtttaacacaattattaaagttactatcataatttacccttaatggtctatttccattcccatgcaaatgtgattattataatcacagcaattatccattgtgaatatgatgaatacctactttacctgatgtatttgtaatcactgtgtcatgattgatatagccatcatcataactgctttcatatttaactatgttggtgtgatcacttttatatacaactgtaattattataattaccaccatgttttttgtggttactataaacaacgcaaaagatcagcgtggttatagtaataattgctaaagtttaatgtgctcgatgcaataacaaccccaagatactttacttattatgatcactattcctactcactctgattactataatcacacctatctctaagggaaattagtataataacaaaattaattctttgaaattgatataatcactaccatcactttcaaaatattataatcgtcatttgaatgtactattgtatttggtatcataactagctgtggctactatcatcacaataatcacatccaagacttcccgtaaacattataatcaccggattaacttaccggagtaactcctcgtgattaacttaatcagacccccaaataaattaattcaacatcctaacttaatgtgcattaattcaaattttcgtagctaacagtgactaagataactattgacattgcttcatgtgaatattataaaagccagcataatttactattattagtctaattacctttaagttataagcttattaactgtactttccatattgattatagtaatcacaaacgtgactcaatttgaatttcataacttttattttatcagaccctgatttaacagttagcaacatggtgtgtatcatgattatcataatcacaacaattttttattgtgaatatcataatcactattactaagatttaaacacattgtaactacagctggtttactattttagtacatccttagtacatataccccagtatcacctggccagtgtttgtctaggatacggttaggatttgactagggacctggctagggacctgggaggcagccgagtagaatccgggtaggatccgagtatgatccgagtaggaaataattaggaaataaggaggaaataaggaggaaataaggaggatataaggaggatataaggaggatataaggaggatataagtaaggacttggtttgcacctgactacggtctaataacagactgagtaggacctgactatgaacaaaataaggattcgagtagagcctgatttaagtctgactcccgtcggattagagtctgctaagttttagttatataatctttgatcattaaaaataatacaaaataaaatgaatataagatgagaaagcttagacgatggttaacttgattcaactattcatgtagcatttactaaaattagtaacacgaaatcacactatcgacttgattaagaatttgccatccattgcttcacgtcttgcgagattttccattaaacgttccaagaacttccatcgccttctacaaagtataaatttatgtttcaaactcatgctctggttactaattccgtatattaactaatatccattgccacgtaagcaatatctgtcatgaacccaagatttccatgtagcgaggcatatcctcaattctattattacctaatcttaacaataacacatcttcaaatatatcattaatgacagcttgtcgagggcttgtgggatgtttatttcttatttattcttcttagacttacttatgataaaaataaatttgttagaagttcattatacacgggtcatttatttacacaactttattggttggactacgtgtgcttgaggggcatttgtcataattttagtttgtttctagaatctgaggttaattataaaactacaataaataacccttttaaacagtaactaattataattatttcgatgataaaaatgcccaaacgggtaaaaaaggagataatgaaaaatggacggagaacggaaataagaactgtaattacgagggaacaagaaataattccgacttccgaacaatgaaagcagagctttttccctaatagggtttttcttttctttttttttttctttcttttttttttaacaaacacgatcattaatccatcaaagcatttagtataaaagtaagattgcttcccgtgcttgaacatttactatacattctcttctctttactctaaaaactatactgtaatgcacaattcaatgaccgctaatccattagttaaagcgtttacatgggcaagaacagttgtcccattagagaaaagaaatgtatttgtcgtttatgcaattatattattaggtacagttcttgataatcttagttctgcatctgctttaacactctcagctaatattcaaaaagaatttaacactgactcatcaactacaagttgggttttatctggctatgcgttaacattgggctcctttattatggttgctggtaaaatatctgatgttattggacctcataatgtatatttgattggtattacgatcttttggatatcagctcttatctgtgcttgtattccacatacatcaattgttgctcttatagtttttagagctatacaaggtattggtgcatctacattgattccttcaacaattgcacttaccgcaaattatttcactggacctttgcaaaagcatttaaacactgcagttatttatatgattgttgctcttactgctacacttggattaggtgtggttttaggtggtgctttttcagaaacaaatgtcggatacaaaggatttttctattttgtttttgcttattcatttgttgttgatgttttacttgttttccttattattccgatcaataaaacagatggtcataataaacttaagatgaaaaatattgattttgttgctgctttcttggttattattggatgtttattaatgattttaggtttaactgaaggtggtgaaaaatggagatcccctaaagcaattgcaccattagtcgttggatttttcacagccgcttcagcattagtttatgaagttctttacataagaagataccaagtactccatcaaaatgaagataaatcatcaagctggaaacttcaagttgatttgttattcccgccagaaatcttaaagatcccaaacttttatccatttttgattatttgtagtttatattatgcaacttttgttatgatcattgcaataggtgtttacacttacagtttcatttatcatgattccaatataataacagcagtgaaagttttcccaatgtcaataggattacttttcggtgcaattgtttatagagattcttattacaagaaagttggttataaaagaatgtttattatttctggtgttctttcattagtaggtattatttggttttcacgtactaaatttggtacaacaaatgcatattggaaatatgatatgggtgcattattcttatatggttatggaattaatatcttcttcaatatttatatgccattagttattcaatgtaccccattacatttacaaggtaatgttaatggtattttccaaacatgcagtcaagttttacttagtattggtaatgcattaattccttcaattgctggtaatcttacaattgcatatacatttgaggaaaaattaatcatacaaaataagcttagaactatcttttatgttatgatgggtttccatgcatttatcgttatcttaatggttgttgctatcaaagatccaaaagctattgaagttgaagatgataatgttgaaaacaatgctattgatcctaatgctgatattgaaaagcttgaagaaaacgataactcagaatcttctattgaaagttctgaaatgaataagaaagcatctgttgaaagtccagctgaaaatttatcaattgaacctccaaaaaataccaactgataactcaatttttatactttttctaatctaatttaatatttctataattaattaatatataattttgcttaatataattctaattcattcatgactaaaaaaaatcagaaagacgcaaaaaacaattagcagttggatagtttgctatattagtagttaataaaaaaaaaatatcaaaaaaattaagcccaacgcggggctcgaacccgcagccttttgattgctattggttaaatatcaatacttaagagtcaaacgctctaccgattgagctagccaggcttatacgcttttttgtttgaagtaataccaccaattgacgtttaccatttaaaaacgtcacgtgacaaaggtcaattttttactttcatcattttattaatagataagagtgtaattgggaattattaggtttttttaacggtcgtaccgttaaaacagttttgaacgaattagaaatagatattaatttaatgaaagtcacttattcagtattatgaaaaggaaatgctgtcagtaaattacacatcgcatttgaaacatccacaacatagacatatactcttaattatttcctctgtctctctgctttataaacaacattattccattttatcagtaattttattagatttgtaatgtccttagtttattttcattgattaattttaatctatttttacaatttaacaaaaaagtttcatagaatttttccgctttaagcggactgatttattatgtagtaccgtaatatagtgctacaaaattgaataagaaaaacaaatatacgtaacaaattatctatttgtgctttgaaaaatccaaattttgttatgagtataaaaactaattataaaagaaccaaaaaaaccatagtggataaagaactgtaactattaatattagaataaaagaaaaaaaaagcaccagggcttttaataaaattaaccatgaaattcattattactattgttatatggtctataccttcttgcacgaccacctctacttcttctatttctacgacgataattcctagaagctttgaatctattatcatcatcattattattgacatagttcatatcattttggttaccataaaaaaccttcatactttcctctaataatgcagcatgcataacacttcttaacgttgaaaatttctcaaactgaactttttttctgatataaaatggtaattttaaaatgtaattactgataagatatttttcaggtaaattatctcccataagatacaaatgcatgtcaaatttttcattaaattcagcaatacgcatatctttagtacattttaattcaagaaatgcaaaatggtttaatctttgatctaactcgtgataacaacaatattctttacgaaacaatttaacaaattcagaccaagttggtttgtctgatgaattactttcactttttaaatgtgttaaccatctagaaggttgaccaataagattcattcttgcaaaagtaagtcttgcacttccacttatcccatatgtttcaatgataaactcaatttttgataaccataaatctgcttcgtacattcgagttaacagatctggccatggaccttcttcatcagttcttccaaattttcctgcataatacattgcttctttaaagacaaagagaggggttattgttccattcttgtttgtcttcatatttgattttatattgtaagtatcaacttcgagagtcattttgataaactattcactaaagtaattaagaatagcccaaatttagttaattaaaacttaataatttattttccctcgataacaaaattttttcggagtttgttttctgtgccgaactttttatcttttctgtgtattatttttacgtaagttttggtgcatctttatcattattgcaatctgataacttcatattgatcaatttgataagatcatgatttattttggatttcaggtaaacttggacagattttttaaattaaagatcacaaaaagtggcataatgatagtgctataatactatcatactttttttcaacaaccagccatactaaacttaagtttcaaaacaagtttattaactattcttgtagaatggttcgattactgttgtacaagtaaagaaattgttgaaaaggtacaagataaattatatgagataatcatctcatctgtcccaaagaggaaattttcttatcatgaaatattgtggctcaaattgattaaaattgtggcatctttttgataacatattaagattaagattaaataatatctaactgaacggcttgtagattatggtgtgatttaatcttctctaagacttctttagtggtgtccatttgaaacagtggagtctataaaaaagccaatataaccataattgtaaacctgctattatggattgataatcctttttttgatttctgtaacaaacacacaaacacacacaatgacaacattaggtaacattaactatgatgaagcaattcacttccataatgatagtgatagtaaatctaatacaggtatattaacagtttcaaaggataatttatcgaaaactgaattcccagaatgggcaccaacttgggatattaaacatgatcatgcatttaaagatattgaaccatttaaacatattgatagaggattttcaggtgatccagaatttaaatcattgaaaaatattgatggtgcatcatttaagaaagttagtccaaaattaggtttagcaattgatggtattcaattaagtaaattaaatgatcaacaaaaaaatgatttagcattattagttgcacaatatggtgttattgcatttagaaatcaagattttaaacatcaaacatttgatgaaattaaagattggggtaaatattttggtccattacatgttcatccaacttcaggtgcaccattaaatcatccagaatttcatttagtttatcgtagaggtagtgaagaggaacaaaagaaacattttaaagataaattacataatattgcatggcattcagatgttagttatgaaaatcaaccacctgctttcacattattttcaatgttacaaacaggtgaaagtggtggtgatacacaatttttagatatgtttgaagtttatgatagattatcaccattaatgaaagataaaattgatgatttacaagttttacatacatcaaaagatcaagcatattttgcaaaattatctggtggtatagaaaggaaagatccaagtaattcaattcatcctttagttagatatcatccagttttgaaaagaaaatgtttatttattaataaatcattttcaaggaaaattttaggtttgaaaactgaagaaagtgatgatttattaatttttttacttaatcatattgaatcatgtcttgatgcacatgttagattaaattgggatgaaaatacagttgttgtatgggataatagaagagttttacatactgcaacaacagattgggattcatcagatattcgtcatgcatttagagttacaacaattggtgaaagaccaattagaaatcaacaagaatatgaaaattggacacctgaacaagagaaggaaaaaattagattaacagattatttaacaaatttatcagctgctgattattatgaaaaggttattaatatttaatcaagatcattttttttatgtatttatataatttaataactattaactaacgcttttatcaattaaaatatttatcataaccagttaaaacaaatctgaattttacatcacttttctcaattctaactaatgcttgagtaacattttcttcattaatatctaaacattcaatcattgggaaaacttcatgttcagaagctaattttaacatgaatttaattttagatggtgaaccactataaataccaccaattttagaattattagcacataacataaatgggtttaaatttaaagcttcttcaccactagataaaccagtaataagttgtaaattaccttcaggtctcaacattgaaatcaattcagttactgtttttgtattaacaaaagatccagtatgaacaataacatcaaatgcatcttcatttttagttaaataatcaggatcatcctttgttgaaataaatctagttgcacctaattttaatgctaattcctttttagaatttgaagaagaaattgctgtaacattagcaccgagagcttttgcaaacataatactcatatgaccaataccaccaataccgacaattgcgacttcagtacctttaccaacattagtaattaaaagaggacttaaacttgtcataccaccacaaaatagaggagctgcaacattagttggaatattatcaggaatttggaaagcaaatttatgattaattctaatatgagaggcataaccaccttgtctaccatcaattttatggaaattaccataagttaaaactgattttttacaattaacttcatgattattttcacatctataacaatggccacaggaatcacattgtgcaccaataccaactctatcaccaattttaatatcattatcattaacttcggaacctttattaataacaataccaacaatctcatgacctggaataattggtaattgaggtgggaagaaatcacccctagggaaatgagtatcagcaccacaaacaccacaagctaaaattttaatatcaacatcagttggttttaaaggtgcaggtgtgtattcaattttttcagcatttgggtagttttcagtcttggtgaatccaataccttgaatcgttgtaatttcagtcattattatgtgattgattgtttaattaaggttaattatagttaaatggggaattaatttatggggaattatacggctatttatagttatagaggttacttataattagtatacctacggacttaacaacagttcccactccgtgtgctagaagggcatcaccaatgtatcatcaagtagaaacttgcaaggaaaggacttaaaattgatgtctccgtgattaatatctctttctcgccagacttgcctcattgggaaatggaaatgttttctatataatattccatattccccacactattattaaagtaacgtaatataaatttgtatatgagtataattaagtaattctgtgtaaactaatacatccattatagaaagttagtgttaaaattaaaacccaaaaaagagtagaatttttaaccgttaagacgtattatacttaggatttcctcttttgctgtctttgctgttgtttcttagccatataagctttaaaattatcattatttttctttttatcattagattcagtaagtatttgaatcttgttctacctttttatctttaggttttaatttattacgtctattatcaattttatcattcatcatcatcatctactaatttctttgtccatttagttgatgttttaccaccttattcctttatttaatgaaccaccagtaaataaatatttatcttctaaatttctaaatcttgaactactcttatctaacattctagcccataccttcaatttgttcattactccaaccagtttctttacataattcatttctaaatgttgatttacgatcttctctattaagtttttctctctgtgttgtataaatacgaaataatttattttcaatttcttccattttagaattagagttattagatagtagtagaattagttatttcattatcaatgtatgtatcatcaggttcatcctcatctgcttcatataataatgctaatgctctttgtaaatttttctttttcaattcttcctcagtttcttcatcaatttcattatttgattcctttttacccatttgaacagtatatgttttaccttgatctttaaattcaaattcattcttatttttcttcttactgttcttcttattctttctttcttgctttacatcataatcttcaatattagcaatatcctctaattccatttcaagtaattcattaataattaattcaacatcatcatttttattaactaataatgatttaacttgtccaatacttaattgtgggaacatatcacgaacatgaattattttaaaatcatcaaattctctagtcggtttagtctatttatcttacttttctttacttcaaataatggtaaaatcatattctttaaatcaggattcatatcattgaatgttttagatagtataaccttagcaattaatggataaacagtacgtaatcttattaaactatcaatttcaagttcatttttcaaaaatttgaagattttaatactagttaatgaacaaaagctcataaccattaatttaacacatgtttcagcattaataccggtaccaccactatataattcctctaatatttcaatccaatgttttgtaacaaaattttgtgaaaattctccattatcattactggaaatcttaacatttttcttattattattaccattcttcttattattggtattaatctttttagttctttgtccaagtaataaataaaggacatcaaaatcttcatttttgaatttaccacttgcaattaatttacctaaatgatcatgtaatgatctaactaaacttaaatcatcacttttacttgtataagaagatttaatattaccaataattaatttccttataattgataatgtaacaaatgattgattaataccttgaattgaatatttatcagccatattaacataaactatacaaaattcccataatgaattaccaaatattttcaaattaactaaattaacagttttcaaatattggaatacaattaattttaaatgatgttgattagttctaatatttggattaattgcacctaatgagaaaacttgattagattctaatgatgattcatgtagaaaagtttgtatgaaatatttgtaattgtgatgatgttttaacatttagaatatatggtgctggtataccttttttctcctctgtataagtatatggtactaatgcaagtaatttcttgaataatgtaatgtaatctaataaaaggtattcccaaataactggatctttatcaattaatgaagaacgaagtttaaaaggtgggaatataggtattggaatagatagttgttgttgatattgttctactacttgcattgtataggtgctttgcttcttcttcaagaaagaaaagaaaacaactgttaaagaactgaaatttaggaaaaattgaaattttcatgttgactcaattacttaacgtttattaacaattagaagatataaatatgatattatacttaatattatacaaaatgtccttcttattagaagaagattctcatgatttccaaagcaccacctccaatgagaaggaaacataataaatagataagccattttggtaaattaactgtcttttggttaatttccttcttaaccttttgcttttcaccagttcttacctttttaataccattagcaaacttttcgttagctcttctttgctggaatgtttgaactgcctatagtagattaataataccaattatcaattggaataatatataattacatgtaatttcaatattccaatctttaatcttcacaatcttgacacgtatattgtcatagctgtgtgagataattatggataaagttggattacatgttatatttccaatcaaatgggtaaataaagaactagatgttagtatactgtgttgatcattcaaaataatcttgtgactaattacataccattgtgaatcgatgtgttgttaataagatatagatcgaaggaaagaattatactataggaataatagaaaatggaaaaaatgaagatttcaccatatttcacgacattttattttgttgctatatgtattatctcttcttacttcttctttacttcttttaaatggacaacaatgagtcacatactacagctttcaagtgataaccaatacatagtacactactctccatcaaaggaaactctcactgttgccaaagtaccttcaaatgcttcaatatctaacttatcattatctgaatctgtttcaatgaaaacatctcatataaaatcactatcaattcatccatctcaagatataataatagcagtaccgaataaaccacatggacaacaatcatcaggaatacctactggtccttcaagttcaaatagtaaaattttaaaaaatgatattaataatgtcgataaacctataccttttaatcctcagagacaaatttcattaacactttattcatataataaacgtgaaataagttcaaagcaacttatattagacttaattaatgaatcaactccttctttattcccatattgtgttgaatattcttcaaatggtgagtatttagctgtttatacaagatcatattctcatttaactggttattctcatgttttatttttatttgattcaaattataattgtttaacatctatttcattagattcatcattagaagttatgaaatggagtggtggttttatattatgtgcatgtactgatggtaaattacgtgttataaaaataattaatgatgatgatgatgatggtgtatcattaagtattaattaaatcattacatctttcatcatctcctctttcatcaattgattataaagagacattgggagagaaaccaatattattaagtaggtacacgtgatgggaattcaatattaatggatccaatatcaatgtcttgttcatattctccattaattgaaaaagatttcccagttttatcagtatgtataggtccattatcaacttttattattacatatgtaacaaatacaaatgaaccggctcatatactacaatataatgaaattgaaccaattgaaaatagagaagttgaaaaaattgaagatgaatcaaattttaatccgattaatgatgtttatcaaatttcagatattttcacaaattcttccatttataatcctagtggagtttgttgtacagataatggtattgttatttacttggataaggatggtgataaaataattcttaaaaatttattgtcattgttaccttcaaaatcaagtgaaattgattttactaaatattttgatggtattgttgttaatgataatagtaaaacaaacaatgaaattaaagaatctaaatcaaataatttaaagaacaattctaaggataactattattcaaatcgtgatcatggtagttctaatagtgttaatagaaacaataacaggaataactataataacagtaattctaataacaataataagaacaaaaataatacgaacaataatagttctaacacaaataacattaaaaacaagaataatactgttaacaataattacaataataagaataacaacaataatagaaatcatagtaacaatacaagtagcaataacagtaggactaatagtactaaaaacaatacaaataagaacgatttaaataataaaagaccacttgatttatttgaaactgatcgacaacattctgatcgtaaacgtcatgaaacttttgaacaatggtctaaaaatagagaaaataatcaaaataaaaatgatagaggttatcaaaataattacagagataatagaaagaattattatagaaattaatattatatatatatatatgtatataactaagctaattttaaattatccaaattttctaaattttctaatggaacaactaattcatctaaatttggtgaaattatatcatctgcagcctgtgcatatgatggtggacttaatggtgcaattgatggataagttggtggaacttcatcagttaatgaaactcccatacctggtctctcagataatataactttaaattgcatacgtaaaactcttgcaacaccagttgctaaaccttgttgatgattactatgatcagttttattaccaccaacatgatcaggtccaactctatgatcagggaaatcatcttccattaatgcagttctacgtccagttggtgtaggtgttattggtactgtagtttgatttgtatttgtatttgtatttgtatttgttgatattcctgatgatctcattctattcgatgatatattacctgtaactatcgccgctgttgaatttgatgaaatattagatggtacatgtcttgatttagttgaatgatttgaagaagctaatgttgattgcattaattcttctgcaattacaacttctaaaattaaattatgagttacataaataccattatttgaatcatcaatatcaattgaacaattacaacctgaatttgcatcttcaaataattcatcataacctaaattaaatttttctgaattaattgaatttctatatgcaattgtattattaatacccattgaaattaaattcattaaagaaatttgaacaactaattcaattctaccacgacctgaaaaatcagatttccatccatttttaatctctcctgatgaaattgtctttatttcttcaatatacatttcagattgattatttgttggtaaaataacttcatttggattacttagtttattactattattattattattattattggtatttgtattacttgctgataatgataccatagctatctaatgaattagattgtatattagaattcattggtgatgcaccaattgaccaatttgatgcagcaggtgctaatggtgtatattcaggagttgattctggcatttcattctgtaaagcttcatgatcacttggatgaatatttggttcttgattacctatactattattattattatttaattgtttctttggtaaactaaaatgataatttaaacttgcatgtccaatacctccactatttttattaattttaaccattttcttttgttttttagtagttaaacaaacttcattgaatttattttcatgagattcacaatgattacttttaactgtaatacattcctctaatctccaatttaattttctcattctccatcttctctttgatgttgaaacattatccattctaatttcaacggggaaaattgaacgtggatatacaacattaggtataactgcagttgatgtaacatcagttggtgggaaaattctagttgaatttttatcttgttctcttaatattgatcttaatattttaataggttgtgataaattaattattctttcctttttcgttattggatctaaatatttaaccatacaaattaattcatatttaattgaagtattagtatttgataatacagttgatggaggtaaatcaccaggtacaacataactaaaaggacacgaatgtgatgaacctttagcaaatgccatttttttcgtcaatatatcccaacgagctaattctgttattttatttgtacatttattacaagattctaaagttgtagaatttggagtaaatggtttaccatatttaattgtttgaataaggtataatgagacattatttaatacaacataatcatttttcaatattgttttattaacttgagagactgatagtattggttctaaattttcagataaagctggtggagcttccggttgttgaatactatttattaaaacgtctaaaatgaataaacctgaaaaaaatgcaccagctgatgaatctggtgaaccatagaaaacaattggaggtgattctataccaacagtaacaacaattggttgattctttgaaggtttattacattgtggtgtatgatattcatcataaattgattgtgtggctggtttagctattgatgaagtagaagcaggttgtaaaggattattctttgaagatgaaaatccaaatattttaccaaaagatggtgccattgtctctaatgtagttactctagtagaatgtatataagaagagccagtgtcagttataaaataaagcaaaataaaacaaaataaaataaatttcagataatcaataaaaaaattttgacgtttttcattatggcttggaaggtataccgatatatatatcgaccggtacaccggtggtctgttggtagcaactgcttttatctttatttatccttatttatgtaagttacacacttaatcaaaggaatgaattgataagggtttggaaattagtgacatagttattgtagacctctttggtgattgctctatgtgatgtaagattaaatgtagcacctgaattagaagaagagattaaaaaaattgcaaatattgcatcacccattggttgatcaaaataaacagttttaatcttttcatcagatatcatacctaaattagagatagcaaaagaaatatttggtttaccattatttgctttaagattatcctaatgatttatcaataattgatctatcctttaatgcttgagtttccaaatattcactagcttcagatgctgattctttattctctgataaatatttttggaaatttttactcatttctataatttcaccatcttcaattgattggaaatctgtatcattagaaagtctactaatgaaaagaccaaatgttgtaataatatcattaaatggagttgattcaactttatatcttgtattaattgcagttcttgaacgaaatttcatatcagatttaggtgttgaactcttctggtaatgcactgacaatagctttactaccaatagaatttaataatgactgttagtttaaaaccattatctcttgaaaaatttacaagtttattagtttgttccttagataaatggaataaagttgaattatgattccacattggctttttcataagttctggatcaataattggtcttgcaatatcttccattggttttggttcaatatctcttggtttaaaattcatcattttagttgcattggggatagttataattgaataatccttgagtattgataattgttgattcatcatcatcatcattggaaggttttacatctaatgctttggaaaattcaatatggaaatttttaccagcagttccatcaaaatatgtatgatccatgaaaaagaaaacagtattagattctaattctaatactagtttccataacggtgttttatcagaataactgaaatttcacattattatattttgccaaaattttttcaggagttgaatttgttataacatcaatacaattaagtaaatcatattcctttatgtattcagatgtataaagtttttcatcaccaactgtaagtgagaaatgtgggaattttaaacagagaattttcaaagctttagtaacaattatttagatcaagttgaagtattatattgtgcagctatacaaaaattagtgtataaatactggtgatttgcacgagatggcatgtaagcttcgtaacctgataaaagcatttggggtggtttttgttttacagatataaagctttttaaaatttgatgaggacactcacaatagtttttatagtagaaagatacgatacaacatagagtgactaatggtagcataatagtcataataagaagataataagaataagataagataacaataagaaacggtttatttgaatcgctaaaaaaattttgacagaaatttcagtgccgtagtaagtaagtagatctcttttaattgaggattagtcacagttcttatttcctatttccattatatcaatattgataaagttatagattataataaatatacaactatttaatggttatagaaggtatgcacaaacgtcagttgaagtagtgataaattctctttatagaacattggctaaagttttatgaaactctttaagtgactgattcaaaccataagcaaaacgttgcattttgcatatataaaaatgcagcactgatatccagagttgagaaatacttatccggagataaattaaataaattgaacagtaggaaatgagttaattggtgtgatactggactggaagaatccttatctctaattcccactgtttttgggtttatggtaataagtctggcttttgcaatattagttccaagtttcctggtgaacagccagaaagtatgcaaatttgtagcctctttaattcttgtttgtagaaaagtaaagactttgttatccagaaacacctgaacttctttttcaattgcaactctccattcttcatgcattaatgcagattcaaaaattttaaaaatgaaatcttgattggaggtagaagcaacagaagacactgctggaagttctaaagaattaaccgatgaatcattattctgatcttcacctaaattcaaaaaaaggttaaatcaaattgtataaattgatctataaagagaatttatcactatttaaactgacgtttgtgcataccatgatgaattttatcaagtattaattgcatgtcatgttgatgatattatagcactgacagctgatccaacacgtctccaacaattattagacaaatacttcaaaacgaaatttactaatgaaccagatttatttcttggttttaatttagttcagactgaagattatttacaaataggtttaagcctgtattttgctaaaatgttagacactttacctcgggaaatgcaagaactcattcaaaagagaactacaaaacaattttctagtgaaattaagaaactcatattccctgagcctattccgtcagttactaaaccaattcttcaagctgctgaattagaattagaaactaatcctgattttgaaagtagtcagcactttgaaattaaaccattggaagcatctcaagtgatggatggtagttatggtacatattttttgaacactaaatcaaaacctactttatgtgatcatcaatgatggtaacatcaaaataaaccaaactaaatacattgacgctatatcagattgatcatttattccagttaaaaactatgatgttcacgaaacgtatggtcacaaacttttgaaatctttatatgatttgaaacaatctggtagaaactggcaacttttattagaaaagaaagtaaaatcatttggttctgaaaagtggtcagatgttgattgtatcacgggaaaacgtaacgcagaaggtataactattgcaatagtcggttattttgtagatgatttgatcattggtggagtgaataatatcaaaacaaatttcaaatgtactaccactgaagttgatgaggacggctatagaaatatcttgggtatagacatcaagattaataatgacaatatagaattaaatcaaactaagtatatcgaggcattgtctgaaagattcgatattaaacgaaaagaatatgtaacccctatcaatgaaggatttttcaataaagatttggaattgggaatatcagaactaaatggtagaattagatggatgagacaaatcattggagctttataccggatattcaatatgctgttaattatttagcacggtttttactcacaactcatgatgaaatcatcaaagaagctgagaggatactcaaatacttattaagtacaaaagagttgaagatcatgtgttaaaattcaaatacaagtcttgagaatggtttatcaatattttgagaatgaaatctttaacccataaaagatattcactaaagataatttagtggatttggagagttgatgataataccttccaaaggatatatctaaccaatctctcatttaaatgaagagaaacaaagtgttgtttaaagtgggaaattgaaataaattgcgaccatttttcatcaacatgaaaatttcaaaaatttaaataaaaataccttaaaattatcagggtttttaatttgatgtggttattgatttaattaatgtacatgtaaataattataaataagtaaagaatgctatattatatcgatggtgttgatataaaattattcttcatcaacgttaacagttgtctcagtaagtataacttcatctaagggtacaattttatcagtttcttctttttcctcttctattccttcaagttcaaatgattcaccagttaatgcagtataaatagatctagcacgaattacaaaatcgtagtcaggtggagtatgaatttcttccttaggttgtggctttttagtttgtttctccttaatttctgttgattctttgttgttctttagtatacctttcttttgtttctttttgctcttttcatcattatcactatcattatcactatcattatcattatcttcttcattttgtttttcttgatctcttgcaagttgttcctctgcatctttaactaatttattccattctttcataactgaaatcatttcattaacaattctatcctttgaaccaccttgaacacttttcaaataaataattaaatcattttcataatcttcaggaattgtccttatatttttaattacccaattttgcttttgtttagaaaatttccaattatctttatcattaacataagtacgtaaatattgtaattgatccttaataactattggacgttcacttttaggtaattttactcttttcggtggtttagaacctttttgtttcttttctttacctttatattcctttaaatcttttgttgattcatccttattagatatagcatttgcctttctcttctttgattcaggtactctaacggcaagtgcaagtggatcactagaggttacagccttgaccttcaatcccaatctcttccaagctggctcacccatgtctgtctgtctattgtatactttgcttgttcttcacagtaataaaatttttcaattaataaattcttcctctattaaaattaaaattttcacagatgctaaaaattgctaagccgcccgtttcgtcgcgtctttgattgtttaaaatattattgtgagttcacaaaataataagaattacagtccaatcgaccttagagtaactcccctcattttattatccttagtgatactacatatagataagaccccttaaaaaatcaatttcaactattctgttaaaaacggtactaatcatgtagagattagctaaaggttaaaaataagaaacctaaaattcaaaatttaaattaagatgtaaataaataaaaaagtcacaaatttcaaaagtggctcagctttgtgttgaagtgttttactgttgttaatcaatgataatgataatgcacaccttaatataatttagtatagtaaagatttggttcttagttagtgattatttcacgcctaggtttccataacttagtagatatttgttttagcaaaaaattaaccaagattagtataccaacatgataatagaatatgataatgctacagtgtatcttagttttttttagatatatgttgggtttgaagtaaatttgtctttggacaatttgaagaaaaataggtatagttgtcacaccaaagtaaggaactatacatacattgtagagtacataccaactaaagatgtgattacgtaatataaatgactttaagcgttcatttagcatgaagtggggacattcatacaattatagagcctgtattattaggtttagagtgaaaagcacgccatagaaagtaaattatagttttaatacttcaataaatgagcaaaatttgcaaatattcatatagcaatagtagtgataaaaaattgtactagatttattaaaaaaattatttatttgggaggatcactaaggacgcattccctggaaagggaataatcagattgaataccacccgaccctttttgttacaatatataccgttggccataggtcactaacaaatttttgaaaaaaggaccattttcaacacagtttataagtgtcttctacgcatcttcaagagttcatattgtatattcttgctcgtgaagaataggagattacaatgatataatttttgtatagttaatgtcaatatcaagaaaaaagtgatttttggaatctaccccaaaaaagagattttttaattccatcactgtatagcttatatggctcattttttagtctctaaaagcccaatcataaagttcttaatttacacattccaatcgtgttatttttaagttaagtgtatgtaaaatagctctgaaaaacagtaaaaaaggcccttttttgtgagagaataatctgaagaaggctcagcgaatatacctcgacaatcatgagaatttccaaaattatgctatagccgtgcctgcttaattaatattggcctatattaatataggagagtaattacactgtgttaagatgatattaagaaatacttaattatgaagtgttattataaacaaaaagaaaaaggaaaaaaattataaaataataaagagcatcaagtatcccatcaactagttggaacacttggttttcttctaaacatcattccataatgaggtctgacatcaagcaccattttatcatgttctggtaaaccacatattggtgtgatattaacatcattatctagccacatccatcttgtagtctttgaaacatttttgatttcaggatgcagacatttttccaaaggttcagtcagacatggaattcttaaatttaattacaatggcaaagatttacttgcaatcaaatatgcagacatggaatccaggtatggataatatccattctgagatactgggtttacttgttgaaataaatcaacacttattatgttttatggctcaaggtgttccacgtgaagatgaagacataaattttcacttccttgcaaaccctttcagtcaaaaaacaccaagtgtcaaaaaaggaaccaacatcacaccatttttcaaacatgtggataacataatgagttggaagacattcaaaaatttgtgctccttgctcaattcttcaaccctttgcatcaattttatgtaattttccttgagcagtggtacatcttcacaaggaacaccttgagccataaaacataataagtgttgagtaaacccagtatctcagaatggatattatgcatacctaaattgcgtttagccatcaaaggaaatgcatgtccaaaaagttttgaatcaattgccttcaatcttgatttaacacgttcttgtgtaaaaaatttgtccaaattaccaggctcttcaaacatccctttgctacttagataatttctaattgaaaaaactctccaaatcaatttttcaaataatctcttgtctaaattcttgaaaagactctttttcaacaatcatgcacatatcctttttgaaaatatgttctctaaaacaacatgcatcagatctggtgatactgaacgcataaagtcaaaaccagtaaaaacagtaaacatgttatcccccttcaatttccatatattacgctgggtagaaaactctgctctcagtgccaaatctctaagctcgtctgaagtaaccattggattatcctcaagattattaaacgaaagtggagcttctccagttttatgactaatcttttggatcttgcaaaatgaacacggaaatgtggccttttgacttcgaagctccaaactagcagctattgatggtatatctccagtaaatgtcacaatgttgacatatattgtatgcttaacctcgtttaatgtaactgtaaaaccttcattccataaatccatgaggtcagtcatcaaaatcttcaataattctctgttcgagccaggagcacttgctctattttgaaaaaaggttggaacaaatgtaaattccttttcttttccatgttctggaagtaaatctaaaattgaaatggcaacaacttcagtattcatcattgttttggaatgaacattacaaccatccattgacaacctcaaattaaaacaaaatgtgttaggttctttctccttttcaatcgaccgacgatataaattgccgttaagaacgctgtccaaagtttcattgttattcaaatgttttgctctatttaattccataccttttttaatcctctcatctaaatacaataatgcaagaaagattctgatacttttgttataaataagaggtttaaggggttactaggataatatagggggaactgttgccagctaagttagatgtctatataggaagttatatattatatttagtaaacctcttcactcttggaagaattttcaccatatattttctcattgaattcttccgattgtcgacgaattagttcctcctaaaattggtgttgtccgttcgaatcctgtggtgatgatttgatggattcgtaacactcaccatttccggatttgacctttagggtatattatgatttgggttgtttgtagttattaatagatcttctatctgttggaatgttatccccgaaaatttgggtctatattctgacaattattgtataaactgtatctggtatataaagtaaaatactaaaatgacgagccttctttgtgcgtcgatgggactattctaataataagcattttttagtattaatacttccctttgtttacaattgagatcagtttcatgattaaagattgttttataggagtgattgattaacaatggtagacgaaagtacattaaaggatgcatttgccctctttgataagagtggtaatggtaaagtttctaatgttgtattaggtgatatgttacgtgcagttggacaaaatccaacattaaaggaaatttcagatttacaagatggaacaaattcagaaattgattattcattatttgttaaaattgttgaaagagatggtggttttaaatcattaggtaaacctgaagattatattaaagcatttcaaatttttgataaaaatttaacaggttttattagtgttggagaaattaaatatattttaacaacaattggtgaaaaattatcaaatgaagaagttgatgaattattgaaaaatattacagttactgatgataattcagttgattatgctgaattcgttaaaagtattttatctcaataaatttatatattatataattcatttaatcttatgttagtattggtaaaaatgtagcaataatcatcattggtataccgaaaacatctctctttaatgtccaagtacttgaagttctaatattttcaccatttggtgttaataatgtacaatcagtcattacatcaccatttgtatcaccaaatgcaattttagagaataatctaaaatattcaacacaacttttatcatccataatttcaactgcaaatgttgatttacttaataattgatcacgattccatcctgttaatatacaaaattcatctccaacatatgcaatttgtgatgttcttctccaaactaatgttggtgtaccactaatactaatatatgaatcatattctaataatgtacgttggaaacattgttctgcgaaaattaaatcatcttcctttaatttaatcatacctgcaataaatgatggtctatattctgcaatacttttactcattttaactaaatcatttttggaaaatcttgattttaaataaacatttaaatcatgatatggtttaacatatgtaaaaggttttttaactttttcataaatttcacttggttcatgatataataatccagttttagtatctgttggtgtatttaattcattttcttcttcaactgttccaatacaaaatgaaattaaacttttattattaatttcattaaattttaatggttgtgtatctttaaaaattgatatttgtttaacaatttcaggaaatgtatatgttttaataccatcaattgttgatatattaccaataaaatattgatttgttgataaatcacaatgaggttgtaatggatataatatatgtttaacagttttattcatttcaattggttgtaatggaaaagtaaatggtgatctccttgaaggattttcatgaataattgtacctaatgttgaatattcagaatctgcagctgatgaaacaaatcctgttgccatatcaccaccacctccactttcattactaccaacagatgatggtcctaatatattacccaaattcatatcaatagtagtcgttgtactactattattagcattagttttcatattaacactatttatatcatcaaataaatatttcttagttttacgtggtgcatcaatacatgttgattcaagtcctcttttaacacatcttttacaaggtcgtgaatcatcacatgttaaatgaccatttcgacaatgaatacatgctcttgaaactttctttgcaggtactcgtcgtgccattttatgataggatatatggaggtatagtggtagattgttgtaaaagaaagataatttaataatttgataataattttgaaatctttcaattcatgaaatgagtgtattactgttttaggaagtctaaaatgatttaaagatatctggggaagtttattatggcattaataatgatattttatatttataatagatttttactagagtatttgtcttttagaatagatctatagcgtttaatagatatctttactaataaaatcgcccatatataacacaaataaacactttcagcatacaaaaagaagcaagtcattgaacaaaaggtgaaatttctgagaaaatttggaaaatttggaaaattgattttattaatgatttaattactacttttctttcttctttttttcattgaaataatgtcacactctgctgctattgcgtcccaatggacatctcttgctccacatattgaagatcatattgttgaacttaattcaactcttcaaaaatctacttatattacaggaaatgaaattaatgaaattgattcaattattttcaaagcaattactccattagctaaatcatggattccaaattcaattgctcaatatagacatattttaaggtggattgatttattacaaaatactgttgaaggtttagatgcaggttttaaaattgatttaaatgttgaacttccaagagaaattaaggaaaagaaagaaaagaaaccagttgcagatgctaaggcagatgctaaagctgcaccagctacatcagctgatactgaagcagccccaactcaaaagggtccaagaggtaaaccatcaccagaagaaattgctaaagcaaaggctgcaaaggaagcaaagaaagctgcaaagaaagctgcaggtggtaataatacaggtaatacaccaccaactgttattgtaccagttccttcaatgattgatattagagttggttttattgaaaaggcaattaaacatccagatgctgattcactttatgtttcaacaattcaaatgggtgatgaagaaggtccaagaactgtttgttcaggtttagttaaacattttgaattagaggaaatgcaaaaaagaaaagttattgtaattgctaatttaaaaccagttaatatgagaggtattaaatcatgtgcaatggttttatgtgctgcaagtcctgaaggtaaaattgaatttgttaatccaccaactgattcaaaggcaggtgataaacttttctttgaaggttttgatggtactcctgaaaaagttcttaatccaaagaagaaaatttgggaaactgttcaacctggttttacaactgttgaagatttctcagttgtttataaacaagaaggtaaacctgatgcttatttagttgataaagctggtaaccattgtaaatgtacttctatcgttaatgctgaagttcgttaaattaatttaatttaataataattactctttataaataatatctattaataacatgccttatatatagaagaaattatgcttccattaaaccaatgataattgaatgattcataatataattgtatcagtcactccgacaaaaaaaaattaacatgataatttcagaatttttcaccatatgagtctttcttttggacaattaagataccccctgattaaacaatgaagttaatatcaaaatcatcctctaaagagggagcagttgttgctgttgttccagaagatgcagatgatctttggacattatataatattatttctaaaggtgatgaaattacattaaaatcatacagaaatattaaaccatcagttaatggtatacccatcccaggtgcacaagctcaaagaaaattacttaatttaacattatcagttgaaagttcaacatttgtatcatctgaacgtgaattacgtattaaaggtacaacgacagttccattaattgatgttccattaagttcatatcatactgcaactgttatgattaatgaacaagttaaaatttttaaagaaatttgggattcacatgatgatgaagttattgataatgcatgtaatgcaatgaaagctgaagttggtgcaattgtacttgaggaaggtgtttcacatacttgtttaataactgattcaatgactatactacgtaataaaattgagaaaagtataccaaagaaaagacgtggggattcatcagctcatgataaagcattaaatatatttttaaataatactgcattagctgcattaagaaatttagatattttaaatttaaaggcaattgttgttgcatcaccaggtaaattacaaaatcaacttatagagaaaatatttgaagaaataaataaatctagtgataaagaattaattagatgtaaatctaaatttatttcagcaacaagtagtacaggatatttacaaggattagaggaagttttgaaaactccttcaattaagaaacaattatctgatacaaaagttcaaaaaaatgttgcattatttgatgaattttcaaaacatttaaataatgatgattatagagcattctatggtgaagaagaagttaaaaaggcattagaaattggtggtgcaattaaagtacttttaataacggatacacttttcaaaaatgatgatgttaataagagaagacattatattgatattgttgaacgtgttaaggaagataatggtgatgtttcaattttttcaagtcttcatgattcaggtaaacaacttgatcaattaactggtattgcagtaattcttaattatcccgtacccgatcttgaagaagatgatgatgatgaaagtatttatgaatctgattaatttattcgtttctatattacagttatatacatgattcctatcggttttatttaaaaaaaaacaaacactatttattattctcaacataatttcttaatctttgacttaatttaactggtttaattccaaaccatttatttaaataccaaacatcaacaccacgtataaattgtaatccatcctgtgctaaacctaatactaaacctattttaccacctttatgaataatttgtcttgattgaattctactcatttgattataccaagcataaccaaaacctggtaaacaaactgccatcattgtattgacaaaatctctttcacctctaatttgatctaaaatcgcttcaatactgaaaattgtaccaacaaatccaccaattttaataccatttctaaatgcattacccattgcatttttagtacaataataagttttacgtttatgatagaaaaaccatccattataagttgttggtaatctatgagaatttgaggctaaatatttcattgatgattcagtccaacctccaagcattccacctaatgcaccaacaaatccaccacctaatgtaaataatgtaactcttgcaactggtggcataccaaatcttgaattataactttcttcatgtaatttattaatatcatcatatattccttgaatatgatctgcagtagattgtgcattcaagtttttatctaaatcttccggatctatagcagccatgtttgctatgcaaaggatgtatatagaatctctaatatatgaaaaattagtgaattttagaaatttcatgttgatggaatttcctattgcggaagtttgatttggtaaatatacacaagttacgtgatggtgtcttttctgaacgataggaaacgataatggcaaacctgagtactccattgataccagtgacaggtaagatggtaaacacatatactgcaccattgattgtatctgttttcatttgttcacttgcatcaattcaatatggtttccatatgtcagaattaaatgcaccatcgagatacattagattatcattaggtattaatcaatctgaacttggatttttaacatcaattttctctattggtggattaattagttcaacatttgcatcatatatttccaagaaatatggacttagaattagttttattattacatcattattttatattgttggttcatttattgaaggtaaaagtgaattatatcattggtttttaattggtagatttacaagtggaattgcagcaggtttagcgattgtttatgtaccagtttatatgaatgatatttcaccaattgaattaaggggagttttaggtagtgttacacaaattagtgttaatttaggtattttaattgcacaatgtttagcaattaaatggaatacattacaattatggagaagtataattgattttggatggatattaggtattttacaattaattttagttattttctttttagtagaaagtcctaaatggttaattgttagacatgaatcaaatgaaagagaaagagaaatggaaatggagaaaggatttgatatattacataaattaagaggaattgaaataccaagtgttttaattaatgaagaaattatgatttggaaagcagagaaggaatcacatttaagggtaattgaatcacaaccacatttgaaaaatttaggattttggtattatcttactgatttgaattattttaattcacgtacaattgcaacatttatgatgttaggacaacaatttggaggtattaattcagttatattttatggagttgatatattaaataaagttttcccaacacatgcattaatgattaatataattatatcaattggtaatacagtaattacaagtatttcatcattatttttagataggttgggtaggaaaccattattattgatttcattaaatttaatgattatatcattaattatattaagtattggtataattaataatattgcaacaattacaattttatcaattttcacatatgttggatcatttgcaattggatgtggaccaataccatttttaattatttcagagacaagtcaattagaggttaaagatttggcacaaagttgggcaactgatattaattggatttctgttttcattgttggtactttattcccaattttaaattcaattattggaggttggacatatttaatatttgcaagtttttgtattgcatttgcaatatttgttaaattctttgttccggaaacaaagggatgtgctacatatgatgatgtatggggtagtcgtgtagattaattatattatttatccattagttactgttatcattgctattgctaatgttattgtataaataagtaaaataaagataaaaataccaagccaccaatccacgtgaccgagtaaagggtctgaacacgtaaccctcctcagaccatacgccttcccaaaacggaaaccaatgaaaaaaagagaaaaaaagagacgcgcaaaatagacgtttctcataataaactgtgactgtgaaacctccctttaagaaaattctttactactatgtgaattgaattttttcattactgttactatcataatgtaatattgtgatatttgaaattgaattttatttcatattttcctattttattatctctttgatattagtttttaatcaaacacatataatatgcctaccagattacacaaaactagaaagcatagaggtaacgtttgtggtacgtatcaaatacatatttaatcataatgataatgatattataatataattgcaattgaaatatccatttttttagaaaagattttttatatcgaaattaagtaaagtaatgataattaatatacaaagtgatagtacaattatggatatgaatatttagagtatatcagttaatatgaaaataaatcagtttttaagaatgaataatatcataatataatatatttctacgaataaaaatctttttttcaaatggatataagatagacatttataaagctaaaagaaacataatactaacatttccccttcccctttattctcttttttttttattaatatagccggtaaaggtagagttggtaaacacagaaagcatcccggtggtagaggtatggccggtggtcaacaccaccacagaactaacttagataaatatcatccaggttatttcggtaaagttggtatgagatattaccataaacaaaatgcacatttctggaaaccagttattaacttagacaaattatggtcattagttgaaaacaaggatgaaaaaattgcatcatcaactaaagatgcagctattgttattgatactttagcttcaggttacggtaaagttttaggtaagggtagacttccagatgttccagttattgttaaagctagatacgtttcaaaattagctgaagaaaaaattagagctgctggtggtgttgttgaattaattgcttaaattaattacatctttatataactataatatactataacacaaatttaaataaaaaatccttctttaatttaatctttattacgttggtacaatttatatcatatcatagctatctatagctatctatatctactactattgaaaaattttcattatgtaatatgtactctcatagtaataatttttttactttcatgattttatttgtttacatttcaaatcttgatctaatgataataaaattgttttccagtttaatgttaaaaaagtttataaatattaacaaattatcattcaaacgttcaatgtctacctcatcattaagtgctgaaactttatgggatccaaaatctaatatacctgattcaattattaattatatatcagaatcaaattattcaaataaatattcacaattaaattttttctttcaattaatttcattattaaaacaacaaaaacgtacaggatggataaatatgggtatacctaatcctgaatctatttctgatcatatgtatcgtatgtcaattatttcaatggttttagattcaaaaaattttaataataataataataatggagaacttatagattttagtaaatgttgtaaaattgcattagttcatgatattgcagaaagtttagttggtgatattgtacctcatgatcttaatattgataaagttgaaaaaagtaaacgtgaatataaggcaatattatatttatgtgaaattattagtaaatatagtttagaaaatgcaaatgaaattaaagaattatggattgattatgaatttcaaagaaattttgaatcaacaattgttaaagatattgataaatatgaactgttaattcaaacttttgaatatgagagattaaataatgttagaatggatgaattttatagttgtcgtaaagttattaaacatgaagaaattcaaaaattagctgatgaattaattaatcaaagaaatgaatttttaaaattaaataatttatagaaaataaaataaaagtatcatataatattatatatagaatctattaagcatactccaagaattatcaaaaccgaaaattattggtgcaattgaatgtctaagtacaagcattgtaaatccaacaaagaattgtaatttcataattaatgaacataattcaccttcattatgaggtccaaaccaaataattactagattaattaatgtaagattagaacttttaataatatcacccttttcattatattcaagtttaattaattttaattttgataataatgataaaattggttttaaatatgattttaaaattggttttttcttttcattattaatatcatcaatttcattattaaaatattcagtaaatgaattatacattaatccatcaatttcattaaatttaggtaatctatgtcttggacaaggtattaaaccaaataattgaggtgaagaataaataaaattaattatttgaggtatgaaaaataacattaaagttttagcataatgacctgaaatacctaaaactgcaaataccataccactaaaataacaccaagtatcaccaacgaaaaacttttgaaggatatttattaaaattaaataatgcaattgaaattgataatgaatggaataagtaatgataatgaaaatatatgaatttcataagctgattgtaaaagtaatgaatttccaattaataaatgatgacccaatatatagtataaatcatttaatataagtaaaattgcaattataattgtttgaccaacttcaataccattaatacctgctaatatattaattgaatttggacaaaaaatacttattgaaaacatataaatataataaaagatacctaaatctattgaatttgaatttaattgaagataattagatataaaatttaggtataagaattgaagttttattaaattctaaataataaatgataattaaaggaattgatgcaattgcaggtaagaaaaatttatgtctccatctaatatcaaataaatcatcaattaaacctaataaaatcattgattcaagtgataacattgaacttaaatatgaaggtaatgaagaaagccaagtatctgtaccattattattatcatttaatgaaattaaattattaaatttcccacctgcacttgatttaatgaaaaagaaaggaattgataaaaacataatgaaaaggtaagtaattgcaggtattataccaattgattcaggtattattggtttaccccttttcgacatatctttaccaaataatccacgattaatgaaaaatggtgatgcttgaggaattatattagttattgtaaaataacctataattgcaagtactgatgttgcaattgttggatgcattgtggatgataaggaattgatcaaaagagtatagtattttaaattggaatttccttaagaacagatcatcatgttacacttaagtattcctaatccagtaattaagtgataatatttcatttaagccccccatgttctcggaaatttaagagaaaacgggaaaaatgtgaaaaattccaaaattccaaaattccgagataaacggcgtcggtgcgtcgctgtttattactgggtcgatgcgtcggtggttttctttcaaattattattaaaattaatttactattggaattcccctcacatgtattgagatttgaatatattatttgaattggacatgattggatagcagagtttggtattttgaaaaatttactttaaacagtacaagcaacacacatacaatgctttcctctgtctcacgtactacaaggtcagcacctttaactacatctcttgttcaatcaagaaatatttatcgtttcccactttcaagtgatattaatattacaaaatcaggtaaaactaaaattacaacaggtttaggtggtcgtcattctaaaactggttatcaagtatcagttttcggtgcaactggatttttaggtaaaattttaacttcaaaattagcaaaacatggtacaattacaattgtaccatttagaaatggtagatcaaagagacatttaaaaattaatggtgattatggtgttgttaatttccatgaatttgatataagaaatttaaaatcaattgaagaatctgttgctcattctgatgttgtcgttaatttattaggttcacatttaaatactaaaaatttttcaatggcagatgcaaatattgaaagtgcaaatagaattgcaaaaatttcaaaagattatggtgttgataaatttattcatgtttcatcttataatgcagatccaaattcaccttcagaatttttcgcaacaaagggtatctctgaacaaattgttaaagaacattaccctgatgcaacaattgttagacctgctccaatgtatggtagaaattcaagatttttaaatgatatgttaactttaaaagttttaggtggtaatattatttatagacaagaagtttatccaactcatgttgaacaagttgctcaagctttagaaaaaataatttatgatgattcaacaattggtaaaacttatgaattatatggtaatgaaagatattcaaaattagaattaagagaaatgcttaaatatatgattcatcttaatcaatatggtttcttccctgctgcttcaggttatgatatgccagttcctgaatttatttcaaaaatttggtgtttattaaatgaaaaattaaatccttcattagaaagttttaattatgatacttatagacgttcaactttacatcaaaaaattgattcaacggctttaacttataaagatttaggtatggttcctgatgaattagctgattggttatataaatatgttaaacctcatattatttcatcttctcaagcaaagaatagaactgtttatggtagagaagaaattttaaaattaagagattatgttaattctccaaagaatcgtctcgatttattcggttatggtacaaagaattaataaatgtctttattattaactaattaattaactactaacttctacgctattcaataatttatttattatttatatattaaacttataatatttatattcaaaaacatccacgtatttttttttattattattatcataatttactatttgttaattataaaaaaattatatatataaaaaaaactatgatactatgctacatttattatacattaatgctatatttatttatatgctattctttattcattattctttaatattcctcataataacctctaatatcttcacctcttttaccatattctctctttaaattaaattcacaactaatatctttaatccaaggatgtgaacacatactacctgcatcaattcttttacttggatcaaattctaacattggtaataagaaattactaatttcattagctaattctttattcattttatattcatcaattaaaacattttctaatggccaaatttttaatttattaattttcttaaaattttgtccacttctatcgaaaaattccctccatttactagttgttcttaaatattcctttggtggccaacttttcaataattcaacaatttgagctaaatgatcatcatcccttgaatatgatgttgaagattttggatcaaataaataatcacttgtaattaattcaaatattaaacatcctgttgaccataaatctgttgaacaaccccaatctccacctaatataatttcaggtgctctatattgtcttgtttgaatatcttcagtataatgtttattaaaccagcatgcattacctaaatctgctattttaatactaataatttcatcaaattcttctaaaattgattgttgtgatgatgttgaaaatgttgatggttctctatcaacagattcttcatcctttaattcatcattttgtgattttgtatcaatttttaatgatggtttacgactttcattaggttcaggaaatggatccagtttaatattatttggtaaatcatttaatgttttcatactatcaattgaatttaatttattatgagattttaaatgttgaggaattggtgtcagggtatgtaatggttcattattattatattattataattatcattattaatttcatttgcatcaacgaaaacttgatcatcatctgtttgacttgatgatgatgtatttatacctgatgttccaattgaaatgtttaaatcttcttcgttaataacattaaacattttagattgtttataacttgaaatacttaatgtactattttgtctattattattatttatttgtgatggtaatgtatttggtaaagttgttgaaatattattattattattatctgatgatttatgtaatggtaatggaatatttaatggagttgaaggtgtcgtattattattattattattattattattattattattattattattattattattattattattaatattttcttgtaatggagatgaaaatgatgaatttctcttttgtgagaatgaaaatgatctgaaaaaattattaacacttgaattttcaacaggtgaagttaatggtttacttgatctaacgggtattgaatttttccttgatcttgatttatttgatggtattatactattagataatgaagattgatgaagatgagttgaactagtaattgatgaatcttttaaatttcttattatacttgattgattagctgatatacttcttgataatgaatgaaatgaacggaaactttgatcagcataatcatctgatggtgtattaaaattatctaatttatcaatttcattaattgataaacttgtagtatgatataatgtattagaatgatcagcatgtctctttttcaataatttatttaattttttactctttctttcaaattctaataattgaactaatttttcaacatcatgaatttcaactaatacattttcaggtttaatatctgtatgaattataccacattctctatgaagataatctaatgctaataaaatttgttttgaaatttgtttaactaatgtaattggtaaacctccataactttcacttaaaatatgtaaatcatgaatatttgaaatatgcatattaagtttttcattatcattgttattattaatttcattattactttcattatctttaccattaacaatatcattaatttccttttgtctatgattttgaaattctttatatctaactaataaattaagcatattttcacctaaaacttcgaaaaccatacaaacatgattaccatttggacctttatgaataaaatgatctaataatttaacaatatgttttttaccttcatgattattattttttaaattaacagtttctaataatttaatttcatcaattgcagcttcaggtataattatttgaagatttaacaattttaattgcaacatgtcttaaattaattgaatcccatgaaagccaaacagttgaaaaatgtccccaacctaattttctaacaattaaatattcattatttaaaccatataattcaccaataaaagttggatgataaccacctggtatataatcattaagactttcttcacattttaattttttctccttttcattatctgttaattcattatctgaatcagtatctaatgatgaaatttcatcatcatcatcattattggtattattattggtattattagtattttgagataaaatacttgaatcagtatctaacagtaatgtagctttaggagatttaagtatattttcaattggtgaattttgtgttgtttgtggtatatttgacaagttcaggtgaagaatttttaattttaagagttaattcattaattttggaattatttgataaattagttgaaggttcattagaagatgatggttcaacttctaatattacttcaggttttaattgatcatttgatgaaggtgaagttgataatgatgaacgtaatggtggatcaattattggtatagatgttggagttgatggtgaatttggagattttatcttttgtttttgctcttctttctctttttccttttccttttctttttcttttataattgacgttgataaaagagatttttgttgatttggggtatgttgatctttatgttgttgaggattttgctttgtaaatgagaattttgaaaagaatttaaattttgatttattatttgtatttgtattggtattggtgttattatttgaagaatgtgaagaagagacactattattattgttattattattattattattaattgaaaatgatgaagatgaagatacagattttgggaaagaaattgatttattccttgataatttaaaaggatttgaaatattattatgaagaggagatgagtttacagaagacatgatgatacttatctcatgtatatccaataaaacctggtaaataaaattataatatataaccataatcattataataaccatcatcagataataaattcatgatgaggaacagaaaatgaaatttttcaattttaaaggcgtcggtgcgtcggtggataataataatattattttactgtggacgggttccgttaccggattaggcaatttaaatattttccatcatgttttccaagaattgttactgaatttatttaaatacgattggaatttacttttatttttattttatttcagtttttcatttgcaattagtgtctctcttccttctttaaccaatcaatcaaattatgtctgtatccatctttgaatctcctttaactcttggtgtaactggtttaattgccggtgtaagtgcttattatttattttctaaattttcaaataatgaacgtaaagttttgaaaaaggatgaatttcaagaattcccattaattcaaaaagttgtactttctaaagattctgcaattttccgttttggtttaccaaatccaaatgatgttttaggtttaccaattggtcaacatattcaaattcaagctgaaattgatggtaaaaatgttatgcattcttatactccaacttcattagatcaagatagtaaaggtttctttgaattattaattaaagtttatccaaatggtaaattatcaacttttattaataatttaaaattaggtgaaaaaattaaagttaaaggtccaaaaggtttctataattataaaccaaatatgttaaatcatatttgtatggttgcaggtggtacaggtattacaccaatgtatcaaattattaaatcaattttaactaatccaattgataaaactaatattactttattatatggttcacaaactgaggatgatatccttttacgtgcagaattagatgaatttgcatctaaatttgataattttaatgtaattcatttcttagatagagcacctgaaaattggaatggtaaatcaggttatattaataaagatgcattaattgaatttttcccaaaaccaaataatgatgttcaattattaatttgtggtcctccaggtttagtttcttcatgttaagaaagcttcaaactgaattaggttttgcaaaggctaaacctgtttcaaaggatggtgatcaagttttccttttctaattgtttagaacattttttaaaacttttaacactttatactttttataattttaacattattatcgtaattagttattaatttaagtgaatgtgatatacagaaattattatatatatatatatatatgaaagagggggggtatgggtcattaatttgatgaaagttttaaatcttcaattctatgatctaatgccatactatcatttgtaaatgataaactatatttattattacgaaatggatgtaataataaattatcatgtaatgcatttaatgctttaataacattttctttactaataacacaactaatattaatttcatttgcaccttgactaatcatttcaatattaatttgttcatctgctaaaattttaaacattgcacctgctgtaccaattaattgtttcatatgaataccaactaatgaaacaattgataaatcatatgtaacatcaactccaccaaatttttttaaatcttcaataacttttaaaaatgatttcctttgatctttaaaatatgaaactgccattgaaacatgaacttcacttgttgaaattaaatcaacaactgttttatgtttatctaaaatactgaaaacatttgctaaaaatccatgtgataaagttttcttatttgaatgaatattaacaactgcaatatcatttttagctgtaacagcagttggaattttcattttttgtttattaaaataatcacttggtaatttatctaatgaaactggtgggatgaggaggagtttgttcaccctttttacttatattatcaggataaataattgtaccttcaccatttggattcataacatttttaattctaattggaattctagcattaataacttgttccattgtaaatggatgaataacttcactaccataataagttaattcagctgcttcatctggagtaactgattttaataatcttgcaaatttaacttttcttggatctgcagtgaaaataccatcaacttctttccaaatttgtaattcatttgctgataatccaactgcaataattgctgcacataaatctgtataacctctaccaacagaatttaataaaccaccaggtacaggaccgaaaaatcctgttaaaactggtacaacattatcatctaattttaaaatttcaattgaaattcttttagctaattttttataaaataatggatctaaagatttttcattatttgataaatgatcatcattatcataatccatttcattaacaatatttgataaattaatataatgagaatttataccattattatttaataatgcagtcataaataaacatgataatttttcaccacatgacattatattatctaaagatttagaactaatttcaccaataatacaacaagcatctaataatttttctatataatcaatttcataaattgtatcattaattaatttttcccttatttctaaattagtaattaaattttcagcatttttaatatgatcatctttaattaatttaagagtttgtttaaattcttcttctttatcatcaattgctaattctgatgctaataataatcttgtagttgtaccttcagatttagtttgagttgatctagcagaacaaacaactgcaactctatttgattcattatattttttaacaatattaagtgtaatttcatttgcaaatttaccaacacttgtaccaccaaatttttgtacaatccaacctgaattaagggaatataatgaagttgttgacattatatgtgtgttttgtgagatgttgataatggaaaagatagaaataaataaagaaagaaagtagagtattaatggaaaatatattatatctagtgactcaccaaccattgctgaatttattctattcctgtaatgtaaaaaacggacgtttaaaaatttatgatggattacgtaatggttggaaaaaatctccgataccggttaaagactatcaaagaatccattataagcagtatcaacatcaagtaataaattctctaattgattatcatcaagaattggtttatcattattatttttcaattgatttaatttaattaaccaattaattaaattcgatctacctttaaaattatcatttatatttgaacttgttgttataattttacttaataaaggatgtaaaatttcaggtgaattataatttaatttaattgcatcaagtaaggttataaatgctgatgttgcctgtgctacttctttacctgatttaattgtttcagtgggtacttcaattgaagtttcttccttttcaggttcaggttcaggctcaggctctgatttttcttttaattgttcatcaaatccattaataccaatttgaattcttcttatacctaattttaaaacttctctcaattcaacatttgtgacgtgtaataatttataatgttttaaattatctaagaatgttaaatcatttaaatcattattattatcattatttataatattccattgattaagtaattcattagataatttaatataatcattctttaaatcattatcattacaattacctttaataaattgttcctctaatagtgttaatgattgtaaaattgagtatttctcaactattggatccattgtataaagaatgcatgaatgctcagctaaatgttattaatagggcaaaaattacttacataataatcgaatcaaatttttttcttttacagatttttgaaaaaaaaaatgtttaatttgttacttatttaagaatgtatatgtaaaatgtaatgtaatatggttgtagataaataatatactatataatagtaataatagtatttaaattagaattagatagaatagaagagaggagattttaaagataaatttattttatatgaataatttaattatttgattgaacttgagaataagtactgaaaggatttgcattctttgaagctaaatattcatcagatttttcttgccattctttattcattgtctttggaatatttctatttgaataataagttaagaataaagttgcagagaatgcaacacctaatataatacctttaaaaatttttgacatttcttcaggtgtttccattggtcttcttggaccccaagtaccgaatgatacataccaacaagctttcttttcttctaatgataattcattccaaggtaatttttgtttgatagctaatgcatcaattaaatgttgtttatcactttcaggtaatttttcccatctaccttgtaaatttgaaattgcagcaggtgtaattgttgttgatgcaaatctagaattaacaagactagttttgatagtttgtttagttaattgtgagagcattgctgtgtattgttgaactaagtgaaataaatgaatatactctacttaactgtagtataatctattaaagacacatactattactatacgcgcttattatactattactatgtctcactcactcacaccatttcaaaattttggcagtggatgattttattggtccaatgagattctctttattttatttggcttttatacgtaactggtgtactagtgtttcttttattttatcacagacgcgtctgcgggttttatacagtatagttattacataatcagttattacataatcaacttcaattaattacttaacttatcctttaattgtgataaatattctctatatccttgaactgtattacttctatcttcaactaatgtactcatacaccacattcttaatgcaattaaatctctattacgatcaatattagaattcataatattagcttcattattagatggtccaattacaatataaacattactatatttaattgatccacttttttctctaattttattaattatattatgtatacgttgattaaattcattatccaaaattggtaattctcttttaccaataggaatttcattaattgaattaactccaaatacatcaaaaattaattgttcaattgcatctcctccaatataaatgaaaatttcattatttgtattaattaaatataatccaaatctttgtaaataattaattgatgcattaatacattcaggtaaaataatttcaccatttaatttaggtataatttcatcaaaattatcttctccttcatatggtaatccacattcatcattcatatcatgtaaactataaatacttggataaataaattgaattaattcattaattggtaatgaatttaatttattaattgaattacttctatgatcacttggtaccatacctgatctaaatgaaatatttttaattaatgattgaattaataatggtaacattcttaaatttgttgaaatttgtaatggtgatgatgatccaacatttgttgcaacaatttctttcttataaacatttaaaatttctaaaattgatttatttaaatattctcttgcaatttcaaatgaattatttaaaattttttcaattccaacatgtgtaaaataatttaaaattgataattgatctgctgatgcataaatattatttaaattatttgaaactggtaatgctaatgttaaaactctaattcttctatctgaatgacatgatgtatgtaaaattgctgtttgaaaataaacaatatttcttctaatatcattatcaattgataattcaacaacatatgattgatctcttggaaatgatgggaatgataataaatctgatgatcttgaaaaaaaatttccaaaatatgcattacctttaattaccatcagaacatctaactcttaaaactgcttctaatccaatttccattgataaatgatttgataattcatttgaaaatttattaatatcttctaaattatttgaattaaatgcaggataaaaatgtgtttgacctgctgtaaattttgttaaatttgataatgttgcaacatcttgatatgttgaacttgttaaaaacatatcaacagtaatttgtgatttattacaatcaattgcaaaacttttataaaatgaattatttgaaattaataaactattttccttacttttaccagaaactgccttttcatctctaacaattaatttacctttaccaatatttggtaatgatgaatgaaataacaatcattttaccaccaatattttgtaataatttatgacctgtctttaaagcagttgataaattaaaatcaattgattgattattaataaaatatgatgtaaaattatttaataatttttcaatatttttacgtgaattttttaaattaacaactaaattatctgcacaaggtataattaaatcatccaatgaattattatttggatcatcatcattaactgatacaactaacattgaaattaaattattttcatcattatcatttggaatttcgaaaaatgataaatttttatcaactgcaataaatgaaacatttgccctaccatgatcatttggaattctatctaaagaatctaaaatagttctaattgaagttgataataaaccatttttaattgaattaattgaaacatcaattaaaaataaataatttaatgattgaggagctctaaccatatattcaggagttgctaaaaattcaactgcaccataatttaattcatatctattaaaaaattgatcatttttagccattgaaggtaattcatttaataatgaacaaaaattacatttccatttactattatcatttcttaattcaacaaatggattaatataagcacgacatcttctacatcttgaaataataccatcattaataattggtaaaggattttcattatcagttaatgaaaggtaaggacgaattgttaaagcaaatggtaattttgatttttttaataaattatttgaatttggaacaacatttaaagttgatctaatataatctgatgaagtatttgattcaggtgattgagtaattgatgaattaattggtaaattaattggaggtggaggaaattgtaaatcaataattggaggtggtatatcttttaataaatcagttgaatataattcattaaacatttcaggtgcaggaccattaatattatttaaattatttggattattaacattattaatatttaaattttggaaattatttgataaatcatagggagatgcattatatggtgcattgatatttggaattggattagaatttaatggagtttgttgaattggaacttgttgaaatggagtttgttgaattggaacttgttgaaatggaattgattgttgttgttgaggaattgcatttgatgttggaggtaatatattattatattaatattaccattagccaatggatcataagcaggttgtggataagctcttctcttactagccattgtagaaaggagggatgttgtataaaataaaataaaatagagttaattaagctgagccagtttagtattgtataattgcctttatttctcaaattgaaatcatcaaagaaaagaaaataaacaccgtgttcaaaatttactatggtcgtcgcatcgacctttttggtttttctctttactattatggagggcaaattatattgaacttataatatacgacctttactgctcttctttgcttttggtattggtatagtatacattacaatacaatacactacattacaatgacaatgacaacatcacctcaagctgttagatcattatatcgttcaatgttaagagaggcaagaggtttcactaattataatttccgtaattattttattcgtcgaacaagagattcatttagagaaaatgcaaatttaaagggtgaagatgcaattaaggcaattaatgaagcaaagaatgatttaaagatacttcatcgtcaaaatgttatctctaatatgtatgattttgataaattagttgttgaaaaggtgtaatataagtatattgattattacctaatataattaaattatactgtgaatttcttttttttttatcatttaattattatcatcaattaatgataacttatttctttctgtacatttatatatctatctatctatcttatatctattatatagtatatatcttatatccatataattaattataactattattattattattattaaaatattaataataaaataactattctattccatcccatataaattataacatttttacttagtataaatttttcacatttcaaatgtcgggaagtacaagtaataataaaaatcaatatgaaaatattgtatcatcaattgattataatagtatgaataacaataataatattaataataatatcaatactaaccaattagatactaatcataataataataataataataataataataatatgcaacaattaataccctcaaatatatcaaatacatcaaatttatcaaataataatcaagtacaatcaataccaactacaaagggtaaatattcattaaatgatttccatttaattcaaactttaggtacaggttcatttggtagagttcatttagtttgttcagttcataatggtagatattatgcaatgaaagttttccgaaaatctcatgttgttagagcaaagcaaattgaacatacaaatgatgaacgtaaaattttatcattatgtaaacatccttttataactagaatgtgggggacatttcaagattgtaaatcaattttcattataatggattatatagaaggtggtgaattatttagtttattaagaaaatcaaaagttttcccaaatcaagttgcaaaattttattcagctgaagttttacttgcattagaatatttacattcaaagaatataatttatagagatttaaaacctgaaaatatattaatttcaagatctggtcatattaaattagcagattttggatttgcaaaacaagttgaaacaactacttatacattatgtggtacacctgattatattgcacctgaaattattgccgttcaaccttatacaaaagcagttgattggtggtctttcggtattttaatttatgaaatgattgctggtacaactccattttatgatccttcacctttgaaaacttatgaaaatataactaaatgtaatgtaatttatccaaatcatttccaattagatgttataaatttattacaaggtttaattaataaagatgttacttatagattaggtaatttaaaaaatggtgttcaagatattaaaaatcatcgttggtttaatgaagttatttgggaaaatttattacaaggtaatattgaaactccttatgaaccaaatatacctgcaggtgttggtgatgcatctcaatttgaaaaatatcctgaagaaagatatgattatggaattagtggtatacatgatcaattcggttatcttttcccagatttttaataactttactactaattttacattcatattatcatcatctattttctatttctaattctaatctgtataaatagtttgtatcatatatattatatgtatatattctcttttctctctttctctctctctctctttatctatctgtttaagttttgatttaataaaaaatcattatacattatattataaaacccctattttactatcattatgatgaataacaatttcttcatctttaacattatcattctctattttccccttaaattcattaaatattctatttactctttcatcttccatttcattaatcataacttcactaaatattaaaaatttttccttattaatttgattttcattaagtaaacctaatttaaatttttttgacagataaacaatttttgacctaatttcaatttcacattcattaaatatattaaatataaattcttgatatttatttaatttacatttatttccattattttctaaccattcccttataattccattatttgaatttttctcccaatataaataaattaaattaacattatttgtttcaattattctagttattaaatatccatcaattatcataccattagttatattaattaaattttgaaaatcaatattatttaaaattaaatgatttttaatccaaatttcattaaattcactctttaaaattaatttaacattatcataatcttttaacattttatatcttgcacttaatgctaatccacaaattattcgacttttaagattattttcccaatcacttattatataatttgcatttaaattaatcttttcatgaattttacgtacattattaatacctaatttcattaaaattttactaaatattaaacttgttaaacctttccggaaacttaaatgtgataatattatcattaattcttcttcattagttttcttatttagaatttcataaattttaccaattggcatattaattaatctcctatttaattcatcctcttgagtatttttataaattccaatattattttgaatatattttaacctttcattaatttcttgaatattattctcttgtttataattaatcttctctaattcatttattcgtaaatgaatttcattatcaatattttgtccctttatattaagtatatttaaaatattatttgtacctttatttaattttaaactacttaatgatatatttctcttatgattgataatattaggtattatttcctttttcactattgctattttaatcatattatacttgattacttattaaaaagaaagaaaaataggtagattaataagatctattttaaaaaaggacatcacttcccaaattcatgttattaaggggctttcaaaaattattagtaagaattgctaaaaaaataactgcgcaagccaggaatcgaaccaggggctcaacgatggcaacgttgaattttaccactaaaccacttgcgcttgttatgctttgatctttcttgtttttttaccccttattgtgttctatattacgtaagcatacaaggcattggtttttttagcttttattgtttcctaataacgttatccagtaatggaaatttttgtttagtacaccagataaaagaaatttaatgaaaaagctttatttgtggcaatgaaacatgtttaatgacggtgtctacttgactgaataattgtttactagtcacgttttgaactggttaattggcaaaattagttatatttttttttaaatttgtaatattgtagaataattgattaattaatgagctgaaataagtattttgagagggttttagttatatcataaatatattccagaaaaagtagttaaatcaatctgttcagtggtaggatatgttcaaagatgttgtaatctaattactctagatgcagcgtatttccagaaaagtagttaaatcaatctgttcagtggtaggatatgttcaaagatgttgtatctaattactctagatgcagcgtccattattaacaacagtaaaagttatttaaataaactaaataaaatataaataaatataaaataaataagaaaaaacaacataaaagtaatattaacaaaccttgaaattcttcgttttatttatactaagaattcaacgttgactaataatttcttttctgatttgcgagcaacactaaattttgattggttcttcgaggctcaacttaataatacactattataatttattattcagtctcactcagaattaccaatctcaacaatctcaacaaaagataaacttattttaaagttttgagtctaaataaagctttacactgtttacatccaattttattagttacatcggatggatgatgtcgaccattattataatgacatttttgttagtaaatagccaaaaagtaatgattctggtaaaaaaaaaacaaaagtgttttaggatatcttatttaggtaattacaaagcataaaacctgttattttttctttcttttatgcttacgtaatgtactattagaaaatgtggataaacataccaaagagaaaaataataattccttgttagctcagtcggtagagcgttcggcttttaagagttctttaagaagtcgaccgaaattgtccagggttcgagccctgatgaggagtttattttttctccatttttgtccttaatatatcacttcaatttttactataattttcgtcgaagcactataaaagagtgttgttttgcctccgttttaaattttgcattttattcgttactgttgttttatttcttgtttttgccttcttcttttggtattcttttagaatcactgggatatggggatgctgctatatccctaagagaatatcccatttatctactagttatttcagaaaattacagtttagttgctaacacaaatagtacttttatcttgtaaatagtgttttaaatcattgttacaaaattcggtaccattatctgttctaagaataccaatcttatagcgtttggatgaaaattgagtctcagaaaaattaataaattgtttaataactgaagaagcagcagatttggttgccaaaggtaaaattgaacaccatctggaaaaatcatcaacaattgttaaaaaatatctttcaccagataaaccaggaacattaatatgaccacaaacatcagaatgactcaattgaagaggatgaattgctttaaaagtagatgattttgggaaaaccttggtcattttaccagcagaacagtgttcacaaattttaaattcagaggaaggagagtaacccaattccctcataaccctaccagatggatgacctaatctagaatgcatatttaaagtattagcaattaaacaataattctaaggaataaatggtgaaaaaataaattgatacaaagtatttggaaaatattcaccaatgattgtaccatcttgcatgtaacagtatctatcatcaaaagaaaatctagcaccggtgtttctagtaatcattggaaattaaatttctggaagtattaggaacataagcaacattacttattgaaattctttgaccattatgaccattgaaaatgacagtacttatcactttaactcacttattaaaatggattttccaataggataacctcaatttaacaggtcgtgagttttttcacccacttgtggccaaagtcattaatacagaatttaccagcataaacaactgatttgaaaacatgccaagcaacatcactattaccttcagtaatattaccatttgctggttaaatggaaacgggaacagcagcagtgcaatttggagaaatatgaccagtttgttgacatcttatgcaaataacatccttttgttttctatttttggggatcagcagcatctaaaattgttgaattgaccgagggatcacgaaacatttgaagatataaaagacataacaagtgatcaatggtcatgccatgagtaaattgagatctcatggtctttaaaaataataatcccttgtgaagtggcatagaggatgatttagttaacttgtcaacaattgaataaagttgacgggcagaaaatccaggatgatcttttctaattgctgctaataaggcagaaccagacaaacattcacattgatagatggaaataatattaccatcaacggtattaataaggacaacttgaagggcccgtttaagataaaatgttaattgaacaacactggggttattggccgaagtatcccacaaaaccaataaatcactgtcagtaaaaaattccaataaaccggactcaaaagtagctaaaatggaaccgtactagaatcttagatgtgatatttttcagcagatttcaaagtattagcagaagtctttggacacaagtgggagaatgaactcataacctgttgaattatggtaatcttgtattgatcataattttgtatcttttatattttattttttcatcaatatattatactgtaagtaacaaagcttaagtgatgtaactaaaatatagttaagcctctgaaaaaaagtaacaactgttccaacaattacgggaactaaaattctttttcttcgtcaacattgaaacatagtttagttaaactttaaattaattaaccaactttaaacaaattaaaactgaaacaccaagttaaaaataatgctttaaaaaactccaaaaaaagaatgaaggaagcgaggttcgaactcgcgcggacaatcgcccaacagatcttaagtctgccgccttagaccactcggccatccctccaattgttttcttctaaagtggctttttgttgtcccttctagttataaggattacgtaattttgttttagctcaggtataaaaaggcatactgaattgatgaagaataaataattaatgcgtctatgttgaatggtaacggctctagtatagatatccatagttagttactttaaggttataaaaagaaataataatatataagttataataaagaaaaacaataagtaagttaaagaacagtaaagagtaagtggaaacttctctttatatagacaaatttatgtctaagataattggtgttttgattaataatcaaatgtttcatgtttgtatttgtcatcacatgaggcattagtaatcataagtattactaatatcatatggtctagtcttttctataaatagatgaaacctagatgaaacacatctatttatagtaacaatgaaacatttgtatctcaacaccccaccataagctaaacatcaattaggttcataccagttaatttcacaaatctttgaaatttgattttagataaacctttagtaaacatatcagcagtcatgttttcagtgttaatagaatgaatttcacactcattgtttttaatatgatccctaataaaatggtgtctaatgtcaatatgcttggtccgttgatgatgtacaggatgtgatgataacatcttgcaaccttcattgtcttcaaaaataattggtgcttcatagacttttcaaaccaatgtgctcaatcaattgttttaaccaaagcaattccttaatagcgtcacccaatgccatatacttggcttccgttgatgacaaagcaacagtttgctgttttgtggatttccatgtgataacagtgttacccaatttaaaattgtaaccagttatagcttttctatcaactttatcacttgcccaatctgagtcacagtacccagccaatttaaaactatttgagtatttaaattctaatcccaaattcaaagttcttttaatgtatcttaatacatgtttagcagcatttatatgagtttgatgaggattcttaatgaatcttgataaagaggatgcagcataagctaagtcaggtcttacggtgttagcagcaaataatagttttcccaccatggtgcgataccgagaggcctttttttcatgaacacatttaccttctggaattaaagaagtactaggcgcaataggaacagtcacagcattatattctgtcataccaaaatcagccaaaaaatttaataaatacctgttgagatgcatgcacactttttcatcatcttgcatgatctccatacccaaaaatgtagaaactctttccaaatccttcattttaaactttgatgataattcttgtttaacatctttaattgaagcattatcatttgacaaaatcagcaaatcatcaacatagagggcatccaaaataataacacctgaggaaaccttagaatagacaccaaattcagaaacagctttgttaaaaccataattcaaaagaaccgaattaattttaatattccaacataaagaagattgcttaagtccataaagacttttcttcaaacgacacactttgtcgacagcagttcgaacacctgggggataaccatataaatttcttcttcaagacccccatttaaaaatgcagttgtaacatccatttgatgcatttttaatttaaattgtgccgcaagggcaaataaaactctaatactttcatatcttacaactggactgaaagtttcaccataatcaattccttgaatttgtctaaagccttgtgcaacaagacgtgctttatatgtaggtggtgttgttgaatctttaacggtaaaaacccatctgcaaccaatagctctacgatatgcttgtagagtacataattcccaagtattgttatcaacatgagcttgaagctctttctcaatagcatccgaccaaaatttagaatcagggccacttaaagcttccggcagagaggaaggaatgtagtcagatgttgaagagtcattgatgactttatgtacagcatttaatacatggaatgaagacccagtgtgttgtcttttagcatcaggaccatctgtatcagtaacttctgaaatcgttcttgttaatgagttttcagtactagaagcatcgggaaggatatcgataacctccgagtcttcattgagaatattattggatgtcataatttcaaaatttgattcaaccattggaatatcatccagcaaatcaccctgttccagcatatatggcatcattggggcatgaacattatgaaacaaatcatgttcattcatataatcaaagtaatcatcaagttctgtaccagcaagtacagtcgtagtttcagtttgcgtttcagatcttccagtaacagatgaaatatcactagcagtttcatttggtacataatcttcatcttcagcagaatcgtattcatccaacatttccatacttgcaagttgtggaccactatcttcatcttgggatgattgattaagtggtctatgaataccaacatctaagttaacattttcattttcatcggccaaaccgataccttcttcaatagcaacagttgtatcaatatttgcctcttcatttggagtctcagataatatagagtcaagttcaggaggtgtggaaggtaaaacattggtggactcgaatctaaggaaagtaagttcacctgagtaaattccagatgagttagtaatatctagtggaagataagccccaccagcagctgcaccggcataaatatctgacaaaatttttgtctgatcctcaaccttatccatatctcttttcttacggtatggaaaataatcatcttgaaatttgacattatttgaaataacaaagtcttgtaagtccgggacgtagcatctgtatgccttatgatcaggactgtaaccaacaaaaatagcatcagctgtttgaagcatcaaaaatagaatttcttttggttttaggaaccaaaacacgacattgaacaccgaaaggatgaaaaattgaataatttggagaataatcgttccataattcaaaaggggatttatttttcaaataagaagatggaagccgattgataacaaattcagcagtcttaactgcttttgaccagaacttaatgggtgcaccggctgatgcaattaattttcttgttttctatgtttcctttccgcaacaccgttttgagaggagttgtaaggaacagttttctgatggaaaatacctttttcataataaaattcatccataattttgttgcaaaactcagtaccattatcggttctgattttagataccttgtatcctttaccactaaaatgattttcagctgttttaataaaattcataacagcgttgttgcaatctgattttacttctaatggaacaatctgagtccatctagaaaagtcatcaacaatagttaaaaaatatttttcaagaccaataccggcaaccgaaattggaccacataagtctgcatggagaagttgcgaaaggaacagttgatttaggagaataaccaacttttggaaaagtcctagttgacttaccagctgcacaagatgaacattcaatcatatttggagcatcagaaaatcccagttgtaacattgtttgaatgacccagtgcattatgtgcattcaaagttctaagaggtggtctagcgagaaacacagtcgcgttttcataccttgtaaccctaggtggaaaatccaaaacatacagataaggactttcaatgtagcaatttttcttgaaatattgtcagcagaactggtaaacattgcatgatcggaataaaaagtaaaagcacctgttgatgaagccttcttaatagaaattaaattttgcatggcatcaggaacataacaaacatcattcaaagtaattttgaaagatgtttcaggattgatgaactcgtcagtaccaacacacctgtaacatttaaattggtgttagcaattccagtgatggtaccagttgattcacggaaataaacaaaatggcgaatatcctttaaaatatgcaaagtggaacctgaatctaaaacatagctttctctagctacttctgtaacatcagttgtattgtagactgaccaaccaactccactgttattattagattccgattttggttttgaatctgaagtatttgacttgttttttgaagcaggagctggagctaaacaatttcttgcagtatgtcctttcttattgcagctgtagcacataatgggagaagaacccacattgtttggtttatattttatttagtgtatttaagtaactattactgttgttaataatggacactgcatctagagtaagtaacttacaacatcaatataaacttgcatattttaataaaatgaatgtaaaaaaactgtttaaataaagatgtcttaaattgtattcttttgattaatttatcaacgtgttaaacggcaactgctttagtagaagtattctttttgtaatctaattattgttgatgcatcgtccatgattaacagtatgttgtaatctaacgactctttgggcaggatccatattttacaacaacaacagtattaaaagaacaaactaaataaactataaaataacttagattatacaaaatatcaacagactccgttcctaggagatcttcgtttttattatacttagaattccaacgttaactatcgtttctttttccaattcgtttcatttcatttgcgttacatttctgcttcataacgtttctttttctgatttgcgagcaatacttaaatctaatctgttttcaaggctcaacttaataatacaatattattatgtattatttagtttcgcttagaattaccactcccaacacaataaagtttcatatgaaaaccaaataaaatatataaaaaatctattgagtttgaccacaatcaaacttttacttaacatttatttattagcaatcataaaagtggtaatgataggtttgatttaaactttattattctgagtgtgatatctaataaaatgatgtctaatatcaatatgttttattttttgatgatcaactggaatcttagataacaactcacaaacttcatcatcttcatatataactgaaatggcatcactctttaaacctagaactatgtagcaattgtctaatccacaatagttttttaactgcataagccatatattcagcttcttttaaagataaagcaatagtttgttgctttttacatttccatgtgataattgagttacctaacttaaacaaataaccactcatttatccattctgcatcacagtaacccactaattcaaaatcattacattctttaaatattaaacccagcttggttgtacctttgatatatcttaatgcaacttttgttgaatattcactccatttttcaatactattattactttcaactaattctaaactttcattaaaatcaaacctttttgtataatccgttcttcaaatcctaattctttctctgtactaccgcaattagctctataacatccacctaatgcacctgcatttccaatttcaagagcattacattcagtcataccaaaatcttgtaacatattcaaaaaagttcagcattaacaattatttgttaggattcagggtattttcgctgggcattctatcaagtaggttatttaattaagtagtataaaacgaataaataaattacgatacaatgtacaataagtcaacctgggaacttatttaccatgtgtattgaatataaacttaaccttctcttgaatgtatctgtttaatagattataatgtttgtactcagttatctaaacaactagtccataactactatccttgatcacttcacgtctgagtagcagattgattggttaatctttctttttcatttcattccttccgtaagcgaaagaacacacagcaacacacacaataaacatccaatatttccacgggcatcagcgagcttacgctccactgggatttatgtatcttcatacatttagacaatctcgcaaagcagagaattactaacaggcttatgtcaagaacttactctgacaatcatgactgtactacacactatagtacatcactttggcacactgagcagccggccttccatcttaatctaatctaatataatataataatgttggtaatgttgaatacacgttaacgaccgtagttctaaactattgatgtaatcacttcagttcttccgagtcaatgtgaaatccaaagaatcattccctgttgattaaataagttagtaaattcaattggagatgaatgaacaggccgtaacagacggtgatggcttaatttgaaatgcatttcatttggccaatttgaaaatagtgtttggctcattggatggaatatcacttaaatctgtatccatatccgtaccggcaacagaaatgccaatagcaatggcaggaggaagctgacctaatttggaatgcattagtttaatattggctggtgtaactgcaacaactttaacaacaaatgaaatatattctgaaaaatacaacgaaacttcagcggaatcaaattgtaaatgatcattggaaccacctaaaataaaatgaacccttacaaagccccaaattgatatgctcttttaatgaagaataaattttgtgtagcagcagggacttaacgcacaacatttaaaacaactccttggccagtagatggatgaactaatttagtttcaccaattcctttaacatctagatgatcttcggtaatgttgaattgaggttatcctatttgtaaaatccattgctaatatagataaaatataatttgtattgttgtttaaataagataaacaaaagtaaaataaataatataaagaaaagaagaggaaatacaaataataaaagtgggaatacatgttcccttatatagttatcaaaatgaacatgaaaaagcaagtgcttacccctctttgaacaaaacccctccgagccgggtttatttaaagtgtgaccatctttgggagtaagggatgtgtgaccgtcttcggcaacatggaaatgaacatgcggggtaaagtaccccactttgagtttagattaaccatctcaacaggtaataccagagacttgacggccatttgttttaaatacaacaaactgatccttgttaacagcaatgtaaatatgggatctagtgtccaccaaatagttgtttgacataagtaatttaaaattaaaagccatgcgtgactcgtaaccatttgtaatccagttattctagatacaacacccattgttagcaacagtgaaagttatttaaagaaactaaataaattataaattttagaaaaattgtgttttgattactaattcctcatataaaacattagttataaatatcacaactagtctaataccacatggtttaaactttaataaataatttgtgtaacgtttttttacaacaacaataaaacatttgtatctcaacatacgccaatttcttttattttattttattttttacaaatatatcacacattattatttttataaccaagatatacagctctttctaaaaccaaagcttagattaaatatgctttaacttgctcattcattatcaatgtttgttttcatttaattatacaaattgaccaaaattttttaattggtcatattgttaattccgaaaatttcttaattttccatataaatagatggaaaaatttaaatttattagatattcatattttcaaaatttcaccatcttcttcaacatcttcttcttctttgtaagctctctctctctacttactccctttttatagattttaaaattaaataaataaattcatcatagtaaatgaatttggtcttagtattgaatgtactgggtagtccacggagtctgtagagtccatgaaagagtgtgccgcaaattgcatacatgattataacacctgtagctgaagatcaagttactacggaattaagcaatatagatttgattattatatattctcgtttgaataaaaaagctgtatattctatcagtaactagattaatacggattttttgtatacaaaatttaacattattgctttacgtttctgctcaaaaagattagattatttgagtttctttccattcgaatgagaatgttttatattgattgtctaatatttcatgatgttaactatttttattagtttttttgttctcataataaatgaagggggtatattttttgacgcaaacattctccgcctctcagtctttgcacttatacaaggaaaaacaacagcagtttcagaatgaaaaaggttacaactacagttatcatgttatgcatatcacttttaaataaagtatcattaaacatgaacccggacgttttttttgggctgtgttcagctatgtaaaccgacattctctcaaggtgatatttacttggctattcgccatatgttgaagtggtttatctaaacatatttcctaagcctcaacttagcctcaattaaaatgcctcagagacttatgttttattactatattagggggagcatgtattcccacttttattatttgtattccctcttcttttctttccattatctattttacttttgtttaccttatttaaataacaatacagttattattataactaatatggactttgcaaataggataaccttaatagaacaagtgcaaatactagttggtttcaaagtaatatctccacggctttgtctacaactatacaaaaactacaaaaaaaataaactcagcaaactttttttaaatattcaatcatcacttgctcgaccatctgttaattttattgttcctggttagatgcatgatgatttggtttaatagttgatcaggatttgaaatcatcaattgaacgttttcttggacctactcatactaatgatatgaatgaacaaaaaagcccacaacttgaaagaatgagaaaaatgtggcagtggattttaattcaatgaataagaaaaaagttcatacactagttaatggatcaaaaattgttaaaaataccttaattgttggatttaggtggatgttcagtgtaaaattacaacaggcgaaaagaaaagaaatattcaagtgaggcaaattatttatacaaaaggttttaatgaatttttgcaattacacttataaaatatattgtttttaccattagtagcacaaaaaatagactaaaaacacatctttttgttcataaaagactgaaaataatgttcattaggaaaaactagacgagtatgagctgttaaaggtttaatagaatatcacctatttaatgaataatttgtttgattccacataggcaccttatcagaccacttaatttttactaggagtgcacattatagtaaaatccactaatgattataatccattttagagggtgaatttaatgtgttgagattgtcagggcgtacatacgacactgtcgacgtaaagtccataactcaggctagggaattgccatgagcgaggtattggacgtcgagcgttgttgactacaaccgacacacatttatactatactatttatagttctttatataacggaagtaatacacttatccctcacctaagctatagagcgagtaacagagataattaatctaaacttaatgcgaggtacagcctccagcatcatcttcaccagcacattcctcctcattcactttggattctcattcaactacttcatcgccaccactatattcagctttatcaagctcatcaccgtcattatcatcatctgcttcttcttcacatatgatgtaatctgctactaccacttctattgttgccgcagataacattgaaatggttcctaattctcctagtgtccctaaaactgttgcctctgtttcaatttctgatgctattgataatattattccacaaaaaaacaagttttaaattttttccctgatgataataaagtagtttcatctggcgataaaaaagaattaatctatttctaacgattctgcttgtccagtttatgatgaagttcatcgagtattaaaacatttttacttccattacgttgttgcaaaagtggcacttcttcagcatatattacttagccaccactacataaacagtgtttcaaaccaggcacaggcgctccatctattttttaatctactactccatctgatacttcaattccagctacatctacttttccacttccacctattattccaatgcataggcctttgtatccgtctctaatattttaattcctactcgttctaaagtattgttttcaggttctgataaagtttgtatataagaaatccgtgttaatctaattactaaatatatagaatatacatacaaggggtacaataaagtatcatattaaaagaacttttcacttagctgtcctagacatttaaaatgtctcgttatacacatgtatgcattttgcggccctttattggcaacttcagtgcactctacagactttgtggactatccattactttcatgacaaatctttttgattattggctatcaaaactgaattaaatgctcatcagatgtataatatttggcccttggttcttcttcctgttggtcgtcgtgctgttggttgtcgctgggttttcactgttaaagttttaacaccgctacctacttataaagctagattagttgctcaagatttccgtatggttaagattattttgatgcattttttccagttgtcaggtatgaaagcgttaaaattgttttgctatctctcagtttgacataaagatccattcgaatggatgtttctactgcatttttgaattgtattttaaacaccccatcaattaatgttacaaccgagattttctgatgctccaaatatgattgaatgctcatcttgtgcagctggtaagtcgactggaatctttccaaaacctggttattctcctaaatcaaactgttcctttgcaacttctccatgcaattttgattgccagtattggtcttaaaaaatattttttaattatcgttgatcacttctctatatggacttggattgtctcagtagaagtaaaaaactgcaacagcgctgttatgaattttattaacacagctgaaaatcctttttaataagtaagtttgttatttaaataatataaagaaaagaagaaaaaatacaaataattaaagtacctgcttccttatatagtaataaaaaataaatttttgtggctttgtggcttttttaaatatgtttagattaaccatatcagcaataaaaaggtactttccaacaaaaaactgttgcttatgattcctctcaaaaaagtgtcgcagaaaggaaacatagaactgtaagaaattgtacgtagttcggccgatagatctgaactacgtaatataatataagacaacaggattataatttcctgttataggttgtataagaaaacaaaaacactaactgcatcagccggtgcttccattaagttttggttagaggcggttaagactgctcaatatgttgtcagtcaaatttcaagatgattattttccgtatctaagaaaagggatattgataagattgaggaccaaacaaaaattccgtcagatgtttacaaatatttattttttattactctatataggggaacatgtattcccacttttattacttgtattttctcttattttctttatattattcattttacacttgtttacattatttaaacaacaatacaaactatattctaacttacttattgaaatggattttaaaaataggataacctctattcaacagtaattaaattaatacatatctgtatttacagacttgctcaattaaatgtacagccaaatatggcttgaaatttaatgtaaattaatttttatttatccaaaataatgaggctcaaataaaatccattagtacaatttctaagattgctaacaaatggggttaaattcaacaacatatttgaaagaacgcgtgtggccaatatatgattaatttgtggtcgtggtttagtgaggaaaatagtagatattcatgcaaaactaaatattactgtatgaactgattagttctgattattgcttgcatttcaaaaaaagaaacgacagtgcagtcatgaagtgcaataaaacaaagaatttcaaaaattaatagtatttcttttaaaagtctttattagttttgtattatgtttgttcatttatattttagtttgtttttttaaataacttttactgctgttataaagtggatcatataattagattacaaaataaataataaaaatacaagggtcaaagctagaaaaattatctaccaaactgaaactccaagagttgaaccatctaagaatggccccagattttccacttaccaaaaaaataacatttaatcctatgaataagctttttggtaaccccaataaaatcaatgaataggttgaggcatctaaacttagcgcaacagaatggctatccacagttaaagaaattatgataatggatgggagttccaattgatacaaggattccttatacaagaattggttcaaatagacttaactccaaagttggtagcttggattgggatgaattaagcaaaataactattttatagctcaactacaattttgctctgatggtagtatttttaagtttaatgctaaatttgaaaaattgttaataaacaggggaatccttcacctatgagcttcatcatggatgcatttaataaaactatcagttcatcagaaaacaaattgaaaatgtggcctttttttaaattatcatgaaattgttaagcgtgtggaaaatacttcaaatttcaataaatcttttctccaacaaaaccacaaataaattcccttgataaaaaccatcagtgaggtggacgcagaggtatagttatgtatgtaaagactacactaatttattacatcatgattgaaatgcttttattacaaattatattcttttttactagccatggctaaggcatataaattaatgggttaaaatcctattgttgaattgaagttatcttatttgtaaaatccattgctaatatagataaaatataatttgtattgttatttaaataagataaataaaagtaaaataaataatataaagaagataagagaaaatacaaataataaaagtgggaatacatgttcccttatatagtaatgaaaaataaaactttgaggcatttaattgaggcttagttgaggcttagaaattatgtttagatccatctcaacatctataagttttcattgctttgtgaaatacaactataaaatgaagtcattagagagactaaaaaatttatgttttgttactgtttaaaaattcaccgtgataaagtttcaataggagaatgaataagaagtgcagagcaacgtgcatcctggtcttctggcgcaattataactcaatttagttacgatgaaggtacatcaaagccttactaaccacatatttgattgcctctttggttcattcatttgcaatgagagttcaaatctaaatttgaatttaaattcactcaactatttatctgatacacgtctccatattcaaggccaataaaccagctaaaaggcagaaagttgaaaattgtgatacgaaagctccatttagttccttgaattagagacatataaaaaatttttctgtgttaaattctttggtcttgttgaaaaggtatattcatagaatccaattaattaatatactgtattaagattgtgtttatgttaacaaatataattacagtagagaaatgtgatagcttataattgaaagaagttagatgaaaatataataccccatgtatgaatgtgaatttatgactcttttatagcacttacatcaaagtattactaaattcttattgatccaatgaaattgctaggtggtttatttagcgccagatgtttttgagaatcagtacgtttcaggcagtatgaattttgcagcaaacgcacttttgcgttgtcctgattacaaatttattatactaagcaaaggttaaaaattaatattatcaaattacaatagtttatcaataaattgaacatcgaggcgatgtttcccgaaacgggagaatgtaaattctatattataaccaatagggacataagaagtgatatagtctgaaagatagactttaataatcctaataatcaaagagattaaatgaaatatgagtaataatttaataaaccaatgttgacagaaaagcagcggtcattaaaaatgatgggataggatcattaattaattaattatacaacttctccactaattgatttagtcacactagattacaactaagaagtgaatgataaaacccccacatgaagaaattgtgcttgcttgtgagataattaaaaatcgttttttaagtatataaataacatgtataagctcttctgtgcgtgagatctcaatatatgagagttggctttggggataacactatatcaagttttatctgaactaactattcgcataccacagctccgccgacagtatttgcagtattaagtacaattataacaactataactcttaattgtattgcaaggatgtaacttatatttcattaactgattaagttatatttcacgtgcaacatcttctacatccttttaatactttacatggtcttaaattatatataataacagcacacgagaagtattaaaaatacttgaaatcagtgctttctgcttattgtaactactatattttgtcggtttttaatagtaatcctcgcgtatataaaagcctccccattatattggtaaaaagatttgataattttgtagagaatattttgcacgtttttaatagtaaaagaagatttacattttatatctgattccagtattattggtactttttcccttaaaaataggaaaaacaaaggtgcatcatctgtgtaattcattgggatttctatgaacaaattagaacaccttattagaataaaaaacaccaaaaccactctaattgctgctaggattatttccaaatttcaaactatcaacgccaaaatgaatcatgcgtaaaacatgttcatgcttacataacaatcacgtaaaaaaaatacatgattgtgcagcacttatatagacagtggtaacctttgatcgtttacaatagcattgttctagatatatgtttaatcaaggctaaagtatgccctctactcaagacagctcaagtgatgatttacatattgataatagaacgggattggatgaaaccccatgtttaacaagagaagaatttttaaaatacggatttggtgggaaaccaacatgtgacaataattactttaatcgccagaagaagaacacatcaagttaataagtaaattaaccaatgcttttgaacaacttgcttcggaatgggaaaacatgaacatatgggagatattgatgaatgaggtcacgggtggatcatttaaacaatctgattttgatcatttgtttactgagaaggaattaaaaatggatcaaaacaaattgcgaatgactttaacgagagatctcgttactgagaattgggagcttcttgatgttgaagaccaacaaaaatattatctaatgtttaaagaatcaaatatgccattagacatttctctatagccagaagtggaacttgatttagccaaattaacgagaaaaaaggaagtaatttgttccaagtttcgtattgaaaatgatgaatatttttacgattttcttccatcaaccatgaataataacaaacaccattttgatattaatatccgcgatacagcggtcaagtaccaagtgttgtacttaatatgaacgtagttctaagaactgtttatacgtacctttctgtatcttatgtaataacctctataataatcggggtgatagatagtaagacttagtttataattaacttcgttatagaaggaagaactacaaagtatatagaataattagtataaagtcgacattaatgtcgagaaaacttttcacctgctaatgatattcatcatatagcgacaaatttttcatatttgaataacatatatgtttaattgttttgtgattctaaattccaaatcatttttcttacttttatagcattgcttgttgaaaaatataatagtcttaatcattaaatatgccatataagttttttcctttgttaatactcaacaaacagtttttttaaaaaaacatcgatttctaattcattcaaaattatttcactgcccctttacaattaaaaaagacgtgatgaacctactttttaacctccacgaaattggcaggggtgataaaaatttaacatccctgtttgtaattcaaacaattcattatagtcaacatggttttgatttgtgattctacccatccaaccaaagcatgctacccaatccaattttctacaattttccatttctgtgttgaattggtaactctaagcaagactaaataactaatagtaatattgtattattaagttgagccccgacgaaccaataagatttgttgaacggtaaccgctctagactttcatctatttatagtaacaatgaaacatttgtgtcttaacaagatttaactattgcttgcaattctgaaaggaaattattagtcaatgttggaatttttagtataagtatgaagaagagcaaggtttgttaatatttcttttacgttgttttttttaagtttttttatttctttattatttagcttattaaaaatttttacagttgtaaataatggaagctgcatttagagtaataagattacaaagtacctactagtcctctctccagcaagtacacctccccaattaaattacactgatgtttatggttctttttcaattaaaggtagtgatgataaaaagtttttcttaactattgttgatgattattcaagatggactcatgttgttccaattcacaagaaatcaaatgttactgagttgatcgagtcatcaattcaaactgctgaaaatttatttgctgttaagggatataaagctgcaattctaagaatagagagtggtggtgaattttggaatgatgaaaagaatacccaatctcaaaaaatcattcaagaaaagtttgcactttgttgttttcagctggtttacttgatttttggtctaaaaaactgctgaatatttatcaataggtatccggctaaaaaatgttattatttcaaacaatgttaagtttaatgataaagcgtttccatacaaaacatttgaaaatttacctatacctaataagtaaccaccatctggtgttaattttggtgctaaaactggtggtgcagtatttcctttgggttctggtatttccgttatggatacggattcaggttatatatcatctgatgagccgaatactacttctaaatcaactaaatagaccacatctcaaagtagatcatcaccgtcagttttatatttttgaattcatctccaatgaacttactaatactgattccccagttcatgaatctaatgctcaagttattgatgctaggttggcatcaagtgaaacggatacctctaatcaaacaaatggtactatttctcaaaacaatgattatattatgttgaatgatattcaaaatgatgattgatttactggtgttttgtctggtgttccttctgctgttccgtttgtttctttttcatctgttgctgctccatctgttaattctccatttatggtttcttattatgctatgctccatctgtggctcaatctggttttgaacttcctccctctgaattatactttgaacgggggaagattgattttggttatattgatgatatgttattctgagattgctcataatcttccaattgatgctgaattacaagtagatttgggcctgattaacaaactcaccgatgatgaacaatcctcttctccattagttagaacaatttcatctgttaccgattaccaaaggcgcacctccaataagagccaatggagacctaggtgctatttttaaggtaatccaagatgcatctatgttttcagttacaaatacgactactacaactttaaatcaagttataaatttgtctgatgttgacttttggaacaaggcaatttgcaaaggaataaagagcaagtagatgtcactaggtttttaatattaaagacgatactaatgtacctatgtttaaagcttgattggcttgcccaacgattaagacaagtccaaggtgttgattattgtggaactttcagtcttgtggttagatatgagagtattcgaattttattcggtatagctgcacaagctcaattaatggtacatcaaatgctaaaagaagaaatttgtatgatggttccagatgcaattgataaagtctttatggtttgaaacaagctcatctttcctgcaatatagaaattaatgatgcgacaatctcagctacccttaaaaggtcgttatttgaatttggtttatattctgaagtgataaatgctgaaattcttttagtcgtactataatttatgataatttattgattttgtctaataatatggcactgattaatcaagtcaaattagtactgaatttaaggtttaaattgaaggatttagttttgataaatacgtttttggatatagaaatttcataaagtttaaaaggtattttactacatcttaataaatatttaaacaatatttgtactcaattatcacatggaaatgtaaaaagcaacaaactattgctttatctttaacataagctgagtacatggcattacgtgatggaattaaggaactatttcagttatatatgaagataatgaagtttgtgagttgagtttatcatcaaagaacaaaacatattgatattagacattattttattagatatcacactcagaataataaagtttaaatcaattctattattaccacttttatgattgctaataaataaatgttaactaaaggtttgattgtggtcaaaatcaatagattttttatatattttatttggttttcatatgaaactttactgtgttgagattggtaattctaagcgaaactaaataatacataataatattgtattattaagttgagccttgaaaactgattagaattaagtattgctcacacatcagaaaaagaagcgttacaaattagaaaaagaaacgatagtaaagattggaattctaagtataagtagaacgaagaattcctagctttgatattgaatctgttgatattttgtataatcttagttattttatagtttatatagtttgttcttttaatactgttgttgttgtaaaatatggaccctgcccaaagagtcgttagattacaacactaaaccctggatcccattaatggtgctaatgtttttgaagaagcttcatccatgttgtaattcacagggtgttcgataatgaaattgatatttggttcaagatcgattattatttttcctgtatttacatttattattttaggttttgcaacctttaacatttcatttgaaagagtttcttcaatagtaatattacttccctatattttatggtttttatgcagaagaagattgaacggatatgttgaaattaatccattggaaatagtacctggtatttttatttttggtaagtttccaggtatttgatagtatgtaattttcaacatatttgtaataacaatgataaacgtagtggtttctgatcataacattaagaattccttgtaatgagtgtgagattattaatgtcaaaggatgttcatttataaattttaacttctgtttaatagtcgttatataaatgaaatatgctcttctaccattgaagttgtttaccaaggtcgatcacacccatacccccatttttgtgaggttgatgccatttgattcttctaactgcaattttcagcggtaaatatttaactaattcttttttaacatgattttcaaaagaatttaaaagaggatccggaattggatcatgttgatcaaaataatagatagtggaataaatgtaagtattaacagctactactcttggatataaatttagatctaaaaacatagttttccttagtcttgttttcaattggtttcttttattgtaccagttgattttcaacaaggggattcctagatagataggattttctttgatatctaaaattgatagcttcaattgatttatattagcaaattgtttgatattattgatacctttattataaataaaaattattgatttctttttatttattttaagatccgaaatttgagcaaaatatttaaaattgatagtgattttaatagttcattattgttctggtgaaacagacatatatcatcagcaaaagctagaatattgataaaaagcttagcatttaaacctctttcattgtatggattgtatttcattcctctaattgattgatggagtttaatgatcagtggttgtgtttcaagattgaatatcaggggcgagaaaggtaaaccttgtcttacacctctccttaatggaatattaaatttatggatccaattttgattaactatattagccgatgctaacatagattggttaatagttgcttcaatagttggattagggaacccaaatttttctaagatctttttaagatattgatgatcaatagaatcgaaagcttttttcaagtctactaataatatatgttgtttattggataatgatggtgatgaattgatttgattagcaagaatccttgcagtttcaatatgtaaatgaatatttctatgaagcataaatgcttgttgatgatgggaaatgaaataatcctgtttgcaataggcattattctattagaaatagaaaagttgattaatctaagtgatgaatttgtaagactgataggacgtagatcatctattaatggaagatcttgtcggtaactctttttgggaattaattttatcaatactttaccaatcttatcagttgtggttaaattgccttgaagaatataatttgccatgttggttagaatcacagcagcagaaatccagttgtttttccaatctctgtaagtaataccatcagtccctggtgatgatggaccattttcatttagccttagaaggtttttatatatctcttgttttgaaaaaggtttaagttaaatcatttttctctttctcagttaattgttctttaatattttcagtgaacttgtcaaatttgttatttaaattttgatttgaataaatttcatttgatgcgaaaagatttgaataaaatgaatttagcatcatttataatattttcatccaaatttgcttcatttgaatgcttttccaaatctaagtctaagtctcttgaagttttttgagagattagctgagatattattgaattgaggatcattaaaatcaaatcctaattctttagatgatatttttttcttatatgaaggtaaatgtttcattatctgaattactttatttgttttccagcgaactctttgcatatatgcattataatccattgatgggcttttagtatccagaatctcattggtgaaaatgtatttatataattgtttattttcaataatgtaagtcaggaattgatggtattcttttgtaaaaattatctttattaattatattattattagaatttgaatcgatatctgataatgtacatactaccggtctatgtgttgtaaactggtagcttttgatgtactctatatttaaaattgatatttcttagcagattgaaggaaacatggaaacggatctagccgattatttgttccatttgaaccgtggttggtagtaacatatacttcttctattatttggaaggaagaaaatatcatataaattattttccattaattgttgatgaagaaatgattcaatacgatttaaatttgttgcttccataggatgtgtattccaatcaccacaaatgattagattattttcaccacgagataatgatgataaagttggacataatgtgtcaatgaaatcttttttgttaatgcagtggaatctgttatcattaacattattgtaaactggtacataaacagagatgatagttaagttttcttgtttgaaatttattgttatatcacagacataaaagtttgcaagttgattctcacgattatgccttggaaaaatattatttgaaatgatttctattgaagaatggtaaataattgctgttcgatgttgaacagattgaatcgcaattttgaagtcgaaattggataataattgttgaattgaagataattcagttgattgatttagatcaaattctgtaagacacataatttgaatttttttattttttgcataatttagaatatgaattaatttagaaggactagttgccttctgaatattaaaatttaaaatttttaacttattcattatgatattttatattttttttaatttttatatttttatattttattaaacttgaagaattaaatgaattagacttgtgagtctaaatccatttgagatttctttttttcaagtttctcttttctttctaatttcatttctatttttttagcatctaataatgtgccagttgctacacacttaccttgtttagaagatttaactaatgttctgacatttctaggttgagttggagtttttggcatacttcttgtagtttcggcatgcttagtttcaacaaccatatcttctatctcttcatcgctatggatgttttcatcttcatttggaatttctggctcatccacattttccaatacttggaaaggattgaccgcattatcaacgttactgactattgatgatgatgaatctgacctagataagttcttaggtttagatggaatagagaagccatctgaatctactttgtcattattgataacaacagctgcatctagatttaaaatgtttgtagaggtttgggccctacttcttttcccattaccatttgtagttgatgttcttggagtaacgggagcgtaaaatacttgatcattaaccgttgcgtttctaattctcaatgcccacattggtaatgatcttgagagagtttttttgaagaaattctctcttgtttttgggtggagggaattaaataacctttcttgttcagcctccgatgattttggacagaaaatttctctgtgaccattctttggaatttcaccttctttgaccttatgtctagggttgtaacatcttctacaacttggtttcattggacatctagctgtagtgtggtctgtacatctgcagtatacacaatgtgtaggtgcagtagacaagtaagtggtgatggggattttatgtgtttttccacctgttgtgtgtgagatggaatgaattttaggtggtaaaactgatgattttagttttaacactgtgtaaataattttattttgttcgtagaacttcatattgaatgccattttggattctttttcttgtggtaattgacaagacataatttctccgtattctgaatagagatttttaataatttcatcatatttagatttaatgatgaaaggagggaactccgtttttaaaacaacaagtgtgttgttttcttcaaaagattgatccattaagttaagatcatatgaattaaatgtttctactaacatggtagaaactaattgtaataattccatcggtggttcagccaatggtaggttaatttttaaactgtatttatcagtattaaacatgtttgcaccttcttccattgtattctcagttggtgcatcaattggtttgctcatattattatgaactttgttgatttttttatttttaataatattattgttgttgttatctttgcttttgtaataatcttcaaagataaattgaaactctttgtgcatttctgctaaatttgtagtattaatatttctttctaattcttttaagaaagaggataaaatttcttgtaatttttcaaggtctaaaaattgatctttgccaacttttagaaagtatgaaaggtgataaaaatgatctttatcaaccgtaatatttgcctccgtaattgttttatggagtttttgagccaacgtcatggttggttgaggttcggcatttacctcttggactacttcatcttcctcagcgcaatcttgaaattcaatatcttcttcatcttcgtcttgagtttcatggtcagtttggttcaaacctttgttttctttttcttcagcaaagactgaaggtaacttgttgaactcaccatggggtaagttgggcggtttagtaacgttttgagggtcgggaggacctgaatcgtcgattgtagtagcttttagggcccctttttcaatcattttttttatttttattttattttatttttatttttatttttatttttatttttatttttatttttatttttatttttatttttatttttatttttatttttatttttattttgttttttttttttttacattaatttcattaaaatatacaattttatacagattgattacttatacgcatatattattcatgcttcatcaattcaatatatcttcataattttttttttttttttacattaatttcattaaaatatacaattttatacagattgattacttatacgcatatattattcatgcttcatcaattcaatatatcttcatatactgaactcaatgtaaattatttctattaggtcattctttaacctttttcttctaatttagatctaataagaactaaatttttcatatttgaataacaaatatgtatcattaataaatcttgttgtaatcctaaactctggatcattcttcttgcttttgtagcattgtttgttgaaaaatataattaacttgattattatatttgccttataagcatctttctttgttgatattaaaccaacaatattctttagatcaatttttatctctaattcttttagaattacttcaattcctttacatttgaaaaagacatgatgagtcccaccttccccttcgcagaattggcaagggtgataaaaatgggaattcaacattcctgtttgtaattcaaataattcattataatcaacatggttttgattggtgattctacccaaccaaccaaagcatgcttcccagtccaattggttttctattttaccatcccaataatctgaattaaatttatccttaaattcttctttgtaaaatctttttgaaaaatgtttaaatgattcaatattgatttcctgatttttattgaaaatttctacaattttccatttttgaacatttttttccaccattgaaaaaaacgatgttggattgaaatctgtagtttctttaacctgaaaatctgagtgaatatcagtcaaataataccatcctcgcaaatatgggaaaatattagagtacaccattaatggtactaatgtttttgaagaagcttcatccatgttgtaatttacagggtgttcgataatgaaattgatatttggttcaagatcgattattattttccctgtatttacatttattattttaggttttgcaacctttaacatttcatttgaaaaagtttcttcaatggtaatattacttccccatattttatgatttttatgcagaagaagattgaacggatatgttgaaattaatccattggaaatagtacctggtatttttatttttggtaagtttccaggtacagctctatttgatagtatgtaattttcgacatatctatagtaacaatggtatgcataatgatttctgatcataacattaataattccttgtaatgaatgtgagattattaatgtcaaaggatgttcatttataaattttaacttctgtttaatagtcgttatgtaaatgaaatatgctcttctaccttgaagttgtttaccaagctcgatcagacccatacccccatttttgtgattttttttttttttttttttacattaatttcattaaaatatacaattttatacagattgattacttatacgcatatattattaatgcttcatcaattcaatatatcttcatatactgaactaaatgtaaattatttctgtttgattattctcaatctttttcatctaatttagatctaataagaactaaatttttcatatttgaatagcaaatatgtatctttaatatatctttttgttatcctaaactctggatcattcttattgcttttgtagcattgtttgttaaaaaatataattaacttgattattatatttgctttataagcatctttctttgttgatattaaaccaacaatattttttagatcaatttttatttctaattcttttagaattatttcaattcctttacagttgaaaaagacatgatgagtcccaccttccccttcgcagaattggcaagggtgataaaaatgggaattcaacattcctgtttgtaattcaaataattcattaaaatcaacatggttttgattggtgattctacccaaccaaccaaagcatgtttcccaatccagttgatgttctagtttaccatcccaataatcagcattaaatttatttttaaattcttctttgtaaaatcttttagaaaagtgtttaaatgattcaacattgatttcctgatttttattgaaaatttctacaattttccatttttgaacatttttttctaccattgaaaataacgatgttgcattgaaatctgtagtttctttaacctgaaaatctgagtgaatattagttaaataataccatccttgtaaatatgggaaaatattagagtacaccattaatggtgctaatgtttttgaagaagcttcatccatgttgtaattcacagggtgttcgataatgaaattgatatttggttcaagatcgattattattttccctgtatttacatttattattttaggttttgcaacctttgacatttcatttgaaagagtttcttcaatagtaatattacttccccatattttatgatttttatgcagaagaagactgaacggatatgttgaaatcaatccatttgaaatagtgcctggtatttttatttttggtaaagttccaggtacagctctatttgatagtatgtaattttcaacatatttgtaataacaatgataaacgtagtgatttctgatcataacattaataattccttgtaatgagtgtgagattattaatgtcaaaggatgttcatttataaattttaacttctgtttaatagtcgttatataaatgaaatatgctcttctaccttgaagttgtttaccaaggtcgatcagacccatacccccatttttgtgaggttgatgccatttgattcttctaactgcaattttcagcggtaaatatttaactaattcttttttaacataattttcaaaagaatttaaaagaggatccggaattggatcatgttggtcaaaataatagatagtggaataaatgtaagtattaacagctactactctttgatataaatttagatctaaaaacatagttttccttagtcttgttttcaattggtttattttattgtaccagttgattttcaacagggggattcctagatagataggattttctttgatatctaaaattgatagcttcaattgatttatattagcaaattgtttgatattattgatacctttattattaataaaaattattgatttcttttcatttattttaagatccgaaatttgagcaaaaatatttaaaattgatagtgattttaatagttcattattgttctggtgaaacagacatatatcatcagcaaaagctagaatattgataaaaagcttagcatttaaacctctctcattgtatggattgtatttcattcctctaattgattgatggagtttaataatcagtggttgtattgcaagattgaatatcaggggtgagaaaggtaaaccttgtcttacacctctccttaatggaatattaaatttatggatccaattttgattaactatattagccgatgctaacctagattggttaatagttgcttcaatagttgaattagggaacccaaatttttctaagatctttttaagatattgatgatcaatagaatcgaaagcttttttcaagtctactaataatatatgttgttcattggataatgatggtgatgaattgatttgattagcaagaatccttgcagtttcaatatgtaaatgaatatttctgtgaagcataaatgcttgttgatgatgggaaataatcctgtttgcaataggcattattctattagaaatagaaaagttgattaatctaagtgatgaatttgtaagactgataggacgtagatcatctattaatggaagatcttgtcggtaactctttttgggaattaattttatcaatactttaccaatcttatcagttgtggttaaattgccttgaagaatataatttgccatgttggttagaatcacagcagcagaaacccagttgtttttccaatctctgtaagtaataccatcagtccctggtgatgatggaccattttcatttagccttagaaggtttttatatatctcttgttttgaaaaaggtttaattaaatcatttttctctttctcagttaattgttctttaatattttcagtgaacttgtcaaatttgttatttaaattttgatttgaataaatttcatttgatgcgaaaagatttgaataaaatgaatttgcatcatttataatattttcatccaaatttgcttcatttgaatgttttccaaatctaagtctaagtctcttgaagttttttgagagattagctgagatattattgaattgaggatcattaaaatcaaatcctaattctttagatgatattttttccttatatgaaggtaaatgtttcattatctgaattactttatttgttttccagcaaactctttgcatatatgcattataatccattgatgggtttttagtatccagaatctcattggtgaaaatgtatttatataattgtttattttcaataatgtaatcaggaattgatggtattcttttgtaaaaattatctttattaattatattattattagaatttgaattgatatctgataatgtacatactaccggtctatgtgttgtaaacgggagcttttgatgtactctatatttaaaattgatatttcttagcagattgaaggaaacatggaaacggtctagccgattatttgttccatttgaaccgtggttggtgtaacatatacttcttctattatttggaaggaagaaaatatcatataaattattttccattaattgttgatgaagaaatgattcaatacgatttaaatttgttgcttccataggatgtgtattccaatcaccacaaatgattagattattttcaccacgagataatgatgataaagttggacataatgtgtcaataaaatcttttttgttaatgcagtggaatctgttatcattaacattattgtaaactggtacataaacagagatgatagttaagttttcttgtttgaaatttattgttatatcacagacataaaagtttgcaagttgattatcacgattatgccttggaaaaatattatttgaaatgatttctattgaagaatggtaaataattgctgttcgatgttgaacagattgaatcgcaattttgaaatcgaaattggataataattgttgaattgaagataattcagttgattgatttagatcaaattctgtaagacacataatttgaatttttttattttttgcataatttagaatatgaattaatttagaaggactagttgccttctgaatattaaaatttaaaatttttaacttattcattatgatattttatatttttttttttttaatttttatatttttatattttattaaacttgaagaattaaatgaattagacttgtgagtctaaatccatttgagatttctttttttcaagtttctcttttctttctaatgccatttctatttttttagcatctaataatgtaccagttgctacactcttaccttgtttagaagatttaactaatgttctgacatttctaggttgagttggagtttttggcatacttcttgtagtttcggcatgcttagtttcaacaaccatatcttctatctcttcatcactatggatgttttcatcttcatttggaatttctggatcatccacattttccaatacttggaaaggattgaccgcattatcaacgttactgactattgatgatgatgaatctgacctagataagttcttaggtttagatggaatagagaagccatctgaatctactttgtcattattaataacaacagctgcatctagatttaaaatgtttgtagaggtttgggctctacttcttttcccattaccatttgtagttgatgttcttggagtaacaggagcgtaaaatacttgatcattaaccgttgcgtttctaattctcaatgcccacattggtaatgatcttgagagagtttttttgaagaaattctctcttgtttttgggtggagggaattaaataacctttcttgttcagcctccgatgattttggacagaaaatttctctgtgaccattctttggaatttcaccttctttgaccttatgtctagggttgtaacatcttctacaacttggtttcattggacatctagctgtagtgtggtctgtacatctgcagtatacacaatgtgtaggtgcagtagacaagtaagtgatgatggggattttatgtgtttttccacctgttgtgtgtgagatggaatgaattttaggtggtaaaactgatgattttagttttaacactgtgtaaataattttattttgttcgtagaacttcatattgaatgccattttggattctttttcttgtggtaattgacaagacataatttctccgtattctgaatagagatttttaataatttcatcatatttagatttaatgatgaaaggagggaactccgtttttaaaacaacaagtgtgttgttttcttcaaaagattgatccattaagttaagatcatatgaattaaatgtttctactaacatggtagaaactaattgtaataattccatcggtggttcagccaatggtaggttaatttttaaactgtatttatcagtattaaacatgtttgcgccttcttccattgtattctcagttggtgcatcaattggtttgctcatattattatgaactttgttgatttttttatttttaatagtattattgttgttgttatctttgcttttgtgataatcttcaaagataaattgaaactctttgtgcatttctgctaaatttgtagtattaatatttctttctaattcttttaagaaagaggataaaatttcttgtaatttttcaaggtctaaaaattgatctttgccaacttttagaaagtatgaaaggtgataaagatgatctttatcaaccgtaatatttgcctccgtaattgttttatggagtttttgagccaacgtcatggttggttgaggttctgcatttacctcttggactacttcatcttcctcagcgcaatcttgaaattcaatatcttcatcttcgtcttgagtttcatggtcagtttggttcaaaccttcgttttctttttcttcagcaaagactgaaggtaacttgttgaactcaccatggggtaagttgggcggtttagtaacgttttgagggtcgggaggacctgaatcgtcgattgtagtagcttttagggcccctttttcaatcattttttttttttatttttatttttgttttatttttattttatttttattttttattttttatattttttatttttttattttgtttatttctgtttgatattaaaaggaaaaacaaaaagccacttcagaagacaacaattggagggatggccgagtggtctaaggcggcagacttaagatctgttgggcgattgtccgcgcgagttcgaacctcgcttccttcattaatttttttaagctttttaaagcattatctttaacttggtgttttagttttaaatttcaaacttggttaatattaatttttagtttatctaaaaaatttcaaagttaatggaaaaaaagttttagtttctagagttgttaaattacttgttgcttcttttgccaaaatgctcaattttatttgtgttattactacaattaagggtgaaattttttatccacaataagtatctattaaactgatttctgtcaattaatgaaacaaaaatacaaaagatctaaaatatcatagaattatagttgtcaaacaaacaaattaatgtctgtctatataaattatatagttatgttacaatatccagaattttgagaactagtacaagtattttaattcatgcctgttatatggtggcaatcattgaaatgaaagatatacctaacagatacaattgtaattgcataattgctttcaattatacctgctaaacaatatagatttctcacaaaggactaccaccacaattcaacaggttatatggatgcctcgtcccatttgcgtccgaagtcatctattgaaatcggctaaaaattattacaattaaaataattcataccgttctattttatctacttttgtgatcggattattggaattttttgttgacggtgaattgtaagttatatttgatactccgggctgatggttcgagcgttgttcaacttacttttcattttaacccgggccgttcaagttgtctttattaataccgttgatggtaatattatttccaagtatcaatacaaaggtttgtctttctgctcgtcaactttatttaatggttggcaagttaacaaaatcatcaagctgttattgccaacaaacctaagtctaacaatagaagatccagaaatccaaaggattttatttgcataagatgtcaacgagctgaccatatttgtttaaattgtactgctgctgttcatgttttaactaaaattattggtatgaataatgaaaggtgctagtgatgttgcttgaaaggttcctccaccagcagttcatgttggcgacacttatactcttgattctggtgctaatcttcatatgactaagaattttgaacattttagtgattatgtttctgcaacttctgttgaaactgtttctggtatttcaggtgatattttacaaatcatgggtacaggtactgttattttcaatggtcataatgatcaaagaatttcaattagcaatgttgcttatgttcctaatacttcaagaaatttaatttctatcaaaataattactagaaacactggcgctagattttcctttgatgattgatactgttacatgcaagatggtacaattattggtgaatattttccagctactttatatcaatttattttttcaccaattattcctgcaaactactcgttaattgcaaacaacttgaatatgcattccagattgggccatccatctggtagggttatgagggaattgggttattctccttcctctgagttcaaaatttaaccatctacttttaaagcaattcatcatcttcaattgattcattctgatgtttgtggtcctattaatgttcctggtttatctggtgaaagatattttttaacaattgttgacgatttttccagatggtgttcaattttacctttggcaactaaatctgctgcttcttcagttattaaacaatttattaatttttctgaaacccgaattttgcaacaatgatttaaaacactatttacaagataaaggtattacttatcaacttactgttccatacaattcatttcaaaatggtgttaatgaaagaaaacatcttaatgttcaagagaaagcaagactcttctttctgaatctggtttacaatttaatttttggtccgaagctgttaaaactgctgagtttattatcaatagatatccgccttatgttctcgatggtaatactgcttacgaattatggatgggcgggcttcctaattattcaatttttcatttttttggttgcaaatgcatggtattaattccaaaggaaaagagggaaaacattttttcaccagtctcagttgctggtatttttgttggatatagtccagcacataaagctcacagggtttttattcctaggattcaagatgttgttgtctcgaataatgtcaaatttgataatacctatttcccaatgttagactctaaaaacgatattcctattatggagaacgtttctccttcagatattttctatggttgtagtgctggtatcatcatcatcatcatcttcttcttcttcttcttcttcttcttcttcttcatcatcatcatcatcatcatcatcatgtgcttcagtttctgcttcttttttacctatgatgcaatcttctgatgttgttccagataatattgaaatgattcctaactctcctagtgttcctgaaactgttgcctctgttccaatttttgatgctattgataatattatttcacaagaagataatgatgtttccaaattttttcctgatgaagacaaattagtttcatctggtgatgaagaagaaattgattctattcctaatgactttgcttatccagtttatgatgaagttcatcaagttcctattgaaccatctttacttccattacgtcgttacagaagtgataccacttcagcatctattactcaaccaccactgcaaaagccatgtttcaaaccagaaacacttgcttcatcatctacatcatctactacaccatcatctaccacttcatcaccagcacttgctccagctcaaccctctgctattgttccaatgcaaaggtccttgtctcagctctctgatattgttgattcagttcctaagcgttccaaagcattatttttaggttccaatgccattcatactgctttttctgcatctactactgtttcatctgctttaccaactacttttaatcaggctgttaattcacatgacagatccttttggttatctgctatccaaactgaattagatgctcatcaattgaatactacttggtccttggttcctcttcctgctggtcgtcgtgctattggttgtcgttgggttttcactattaaagattcaacatcaccacctacttacaaagctagattagttgctcaaggttttaggcaagtttatggtttagattattttgaaacattttccccagttgtcaggtatgaaagtattagaattgttcttgctatctcagctcaatttgacttaaagatccatcaaatggatgtttcaactgcattttgaatggtacattgaatgaagaaatttatatgatggttcctgatggtgttgatgctccttctggtatggtttgcaagcttaataagagtctttatggtttaaaacaagcccctttttgttggaatcaagctatcaatcaagttttattatctgctgactttcaaaggtgttcaaatgaatatggtatttatactaaggtgttttctggctctattgttattgttgctctttatgttgatgatttattaatttgttcaaataatcctgctgctatttctaatgttaaaggtcttctctcttctcactataagatgaaagatcttggtgttgcttctaggtttcttggtatgaatttacatcaatctgaaggaagtgttggtttatctttaaatcactatctcaatgactatttggttgattttaatatgcaagattgcaatcctgtttctactccatttgctgctggtactgattttttgcctggtggtgctatttctgatgctgatgttacccgttttcgcagcatggtagggaagttattatttgctgctaacacttgtcgtcctgatttgtcctatgctgcttctacattatcaagattcattaaagatccaagagctaatcatattgctgctgctaaacatgtcttaaggtatattaaaggtactctgtgatttggtttggtttataagaaggtatctaattttcaattgattggttttagtgattcagattaggctggtgataagtttgatagaaaatcaattactgggtatgtctgtatgatgtctggctgtgctattacttggaagtctaagaaacaacctactgttgcattatcatctactgaagctgaatacatggcacttggtgatacaattaaagaactactttggttaattcaattggttaaaactgttggtcttatattcaattatcccaactacaatttttgaagataatgaaggttgtaagttgcttacaagtcatcctgtccatcatcaaagaacaaagcaaattgatatcaaacaccattttattagagagcatttgggtaacaaggttttcaatttggaattggttaaaacagatgaaatggctgctgatatgtttacaaagaatttgaatagaatgaagtttagaaaattcaactgtaagattggtatgactcctatttgttgagattgttgagattggtaattctgagtgagactgaataataaattataacattgtattattaagttgaacctcgaagaaccaatcaaaatttagtattgctcgcaaatcagaaaagaaattattagtcaacgttggaattcttagtatacgtaccacaaagaattccaaggtttgttaatattacttttatgttgttattttatatactttaagttatttttatatattatgtagcttgttcttttaataccgttgttgttataaatatggagcccgcccaaagagttgttagatcacagcatgaccttccttggaacaatggtctgttcttcaattttgtattactttgctggcacttttgatttaggaaatttttcacctctactaattgtgttaaaaaagcctgctgtgtttggctgaaatttggggcatactgttggtaaatattttaccagaaaaattacaacgttagttaagctaagaagtaacgttgatgaatattattgtttgaatttagaagttaatagtcctaaaaaggctatattggtcaaaggacggtagatatttgtcactctgccagtatcaaagaaatggctggttataatgttccacacatgaaacatatctgcaactttatgttttgtaatcaagaaaggatgctgctagtttcttaaaaagaatggtttgttacaaatctcattacacgtcccacttccaggaattttatcaaaagtacaatcatttcagattagaaattgttgataaatgccaaacatgaagttaattttattgtattgaagagtagtaatgaagagtttttttgttaagaaagttagttgcaatgctttagaagataaggattggtttgcaaaaagagataaatttttaattgattctggtgctacttcacatgttgttaataataataagtaggcaggatcccgtattcacaacaacaacagtattaaaagaacaaactttataaactataaaataacctaaattatacaaaaaatcagcagaaacattatcaagcctaggaatgttttggctctacctatactaatcttccaacgttgactatcgattattactctaatttggtttgtttcatttgcattacttttctgttttatagcactaatgattttgtttctttttctgatttgtaaacaattattgaatttgactgtttttttaacgctcaactaacttactcaatgttattatttagtattcagttttgcctgggattgccaatcttgtttttagcgtacaacttaaaaacatggtgtattttgcaaagtttatttttactactaaggaaggggtctaatgattgatttaaaatatagctatatttttggcaatgaaaatgaataagatgatttgttacagaaacacaaagaacttagtcatgcaccagaaaatcaaatgaaaactttagggattgaaaatccaaatggcactaagcaaactgtgttgattttagctagaattaatcattcctgagcctagggtcataccttgtatggcaatcacggttgtcgatagtttagtatatgatcagtaaggaacaacctgtattacctgattattataggattggtcgtcgaatgtctggtgggtttgtctctggtacacaactcgacgagggtaattactatgtagatgcagctaccttactatacttaatagaacaagatttcaacacttattaatatctgtaagtagctcttatttctaacaattttacaattgacagctccacatagtagtcatcaaattggaaatgttgaaaatgctaacggatacctcaagagaaaagttagaattttattagaagagtcaggtttatataagtcattctggaaaagaaacaaatatcaagattttgtatccatttggttgtttgatgtttactaagaatggcgtacttattggttatgataaatctttgaaaattgctttagtatgctgataaaaataaggttgagatacgaatagtggaaatgataccgggcctagttcgcatattggtatgtatggcagtggattatcttgctcatttatggagtctccatcgctattcaaatcttctgatcctgacggcgttgctagtggtcaatcttcaaacaaaggtaatacagaaagtcagttagacagtgttacagaactgagcaatactaatcaaagagtgggatttagaacagggctcagtattccatcagacgaatcatcaattagtgttactttaaaatttttatgtgatagtgataagataggtgttgatcaagaagttaaggaataccaaacatatcaggaacaacaagttcaaatattagttaagatgatgtttttaacaaaaggaagagaaaaaacattataaaatcaccaaaaagccttctaatcatggtttaaaactaaaccaaaattacccctacttcaaagagagtttttaaaacaatcaaataagtcagaattagaaggtcccagcgatgaaactgattactcagatgcttcagaaacgttagaagttaataatgaataataatgataataataataaaattaaacagaaacaaattggtttttcaaaggttagaatacaaagtacagtatgagcaaactcaataaataaatcaaatggtactggcgttgctgtttataatttggcaaataaaagaacaggtttttttcaagaaataatttggctctcccaaaaaaatatttcaagaagtaatacattagaagtatatcaaaaatcttcaatagctagtttaaaatgttgctaattttgtgaataaaaataaattttaataacataaataatgtggctcaaatttttttattcaatgatatccaaacagaagttcgtttgatgatggaaacaaaaatttatcgattcaagatgcaaatgtttgagttgaaaaatttatgatatcaatacataaaggaagcagctattagaacatcacacaacggaggaaagtttgtatcaaaggaaaaacctcaaaacaataaactagaaaatatactttagtttgtaaatcaaaaaatgctaaagatgctttaattgttggaagcagagtaaaaataaatccggtaacaagaaaaagaaataatcaaggtggcatggttcaacacaaaataaaggtgttaaatatttggaaacaaagcaaatgttggagacaaaaaagttcaatgaaatacgcaaaggcttgcaattctccatgcttgcaaaatgcacttgattaaaagtattgtgactacatcggcaaagagaggtatattaacaaaaaagtggtatcttatatcattatttagttcagcacacagagcaatatggttaatagcttgtcatcccatttacaaaaaaatgaaattattactcaaatgatattttggtgtattatttggtaataattaataatgctctatcattgcaaactcagcaaaataatagaaagaagagataaaaaacaaccaaaaaaataataataaacaaaaaaaactgaaggaagcgaggttcgaactcgcgcggacaatcgcccaacagatcttaagtctgccgccttagaccactcggccatccctccaactgttgtcttttgaggtggctatttattctcgtttttagtcttaatgattacgtaatcattacaaaagaaatcttacttttaagttttactactgatattttttaaagcataaagtaaagttaaaattttgaatgtgccaacaaaataatttaaaaaatttttcaacttaaaaatggtataatggaattttaaaaaagttacttaatgtggtacattattactgtattaaaacaaaatagtttagctagcaatatttgatacaaaaaaactgtaacaaaacaataataaatacacactttttgcgcttacgtaaacagaacaataacatgcaagctaaccacatagagtaaacaacatgaaagtgaacggtcgtggttcgtcgttggatctttaatttataattggaatgtaatagttaacaacgaccgatcctttcttaaacttgaataaagtattaattaagttatagtctagttcttattaaaataaatacaaataaatataaataaatgtaatctaattaaatgtaactctctacttttctatgtaatataaataaggattctatgtaaacttgtaactcagtattcagctgcgtggactggtgtctaactaaatatctctaaatgatattattaaatgttgatgttgggaaagtattccaatatttatatttctcataaccttctctctcgcggatgatagaactttctcgaatctattccaaaactcttataatctttctaacatgatttctatatttaatattagttattcgagtattccaaatatagtaattaataatcttatttcccaaataagtaattcataatcattcttaatcattaataacaattcacaaatgtgttttttttttttttttccagtcaacttctgtattactataaatttataaaagatactataaatatttttctctaaaataaatgctatataataaaacattcagtccggttaagggaaaggataatcctataaaacccttttgttatattgtaaaattaaatgaaagatgaaaaagaacttaaagagtaaatgaactgataaagaaatgtaaataatggttaaattgtttataagttttgtgtgattattgtgaagtgttggaaaccaagaataagatggaagccttaccggtatttgaaatcccagtaagtatcttctataatattctcattttcccattgtaatatttcaggtctcttggcataagctaccctatgacaatagacaagaaatttaatgaaagtgtttataaatgtaaatgacgacgtttgtggtttttgcggacaaattaaaatagttgtggagaattgtagagtatgttgttgatttgattggtttttgataaatttgaatatgtgggtggtgatgttgcattcattaataacatgtctaattggcgtcccgttgaatggaaggccacatagacagctactgtaaaatgtattgtttagtaatccggtgttaagtgcatataggtagtagtaatcttggggtttggtgaagatatgttgattgatgttgttaaagaagtttttccattcttggtcaccaagctgtgcattgttggcccaagttttagtattggtgttgatatagttgatgttttggtggagtttggaagatagatgattcaagtcctgataaagaatatttgaaggttgctgggatttatttttattcaaaaattgattctgcaatttggtttgtaggatattgttgtatgaggttatggtttgaggttggttgatggtgttgcaggtgatgtgatcagtcatttccgaatcttcagctggaagatttggtagtgtaactgtattcctccatgctgttaggtaggtttggagaggatggtagatgggtgtttcaggagatatatttactggtagaattatgtcactgctgagggaggtgtgagctggtggtgggtatggtcctagtgatggaggaatgatgttatgatcaaggtaccaggcttcttgttgatttcgttcatcaaaatgttgttgtctgtgttgctctctgaacatttccgagtatctgatggttatttttgatgggtggatggagatatgtgatgttgatggatgttttaactggttgttataatttgtggttagtaagtaccatggtgtaaaatgttgaagatgttgaagatattgggtgaaatgatgtgaggtttggatagtggttggatgttgttgatttagttgtattgcttcattaacttgagtttgaatggtgttaatggtattgttaatgtattgagagtataatagatttgattgaagattgattcggagaagttggggtaggtatggatgctttgcatccgactgggaaggatcgagcatgtatagtatgaaaaatgctcttcttccctgtagttgggtttcaagatccatcattccgaatcctccttgttttcttgggatgtaccaatagtctttgtttgtagggatttttggccatatttgatttctgactattgatttaacattgttgataaatgattgtaaggtgggtgcaggtataggatcatgttgatctaagaagtaaatggtggagaagatgtaagtgttaatcccaagtataattaggtgaagtggaaggtccatgaagcaaattcttcttaatcgagaggttagtaaatccagctttttataccagttggttttcatcaatggtactcctaggtaggtcggattttcggtgatggaagtcacctcaatatcatctgtgattgttgatttgatgtgttgaattgatgatgggttgcaatatagttttgttttttggtgattgagttttagaccacttatgttttcaaattcagagaaaatttggatggttttgttgatgtcgatggagtcttggttgaaagtgataatatcatcagcaaaagcctgactttttactttttttgtgaaattgctgagagtggttgatggggtgaatgtggttagagggttatagatgataccgttgatggtggagtttattttgtttaataggggttctaagcaaagattgaagatgaggggtgataatggtagtccttgtcgagttccattggatatatcaattttgggtcgatatatgaatttaccattgagaagttgggtgaaacctgctcgagattgaaacattattgctttaatgaacgttgatggaaaattaaatttcttaaggatggtggtgatgaagttgtggctaatggagtcaaatgcttttttgatatcaactagtaagagagaggcgtgtgatggtggggcagcattgatatagtttgctatgatctttgctgtttgtatgtggaggtggatatcccggtttggtaagaaagcttgttgatgtggtgatattaatctgttgaaaatgttcattgatcttctggtcaatgtatagttgtatagcctaaagatggtatttgttaaagagattggcctgaggttcccgggattgggttctttaggatcaaaatttttttttggtattagtttgataattgagttgaagattgatgattgagagttgacggtttgagatgcttggctggttgagaagtgtatttgattaatgaactgaatgatatgaagttttgaatattcccagctgtggaaccaggcagcatatgtgatgccgtctggtccaggtgatgaagggcctttttgatgtagtgctttaaggttgttaaagatttctgtttcttcaaatttggcattaagattttgtatttctgaatctaatagctgtggggctatgaagttggagaaaatggagttgaatagaatttctgtatctgtgagggaggtaatggagttgttgttgaatagagaatcaaaaagtttgtgtgacttttccattgtaagtttggaaaaggttgtttcatttaagaaatttttgaatcgtttgttaagttgttggtaggtgatgcataatggattagagttgtgtgatgctttcaaatttgagtacagattttctcgggttgattggtgctctgatggaagaagtctggagagtcttttgacttttgaaaggcggtgttgtatacatcagatgtagtggttcatgctgagaataaggttatcttcccatattggtgtaggttggaatatgaacttgattaaatcagggtgtttggtaaggtgatgtgggaatggagattttctatttgaatatagcgatgttgggaatgaaggagagtgttgatttgaagaatgctttttccttcgagattttggtctgatggtaagcattatcggaagatgggttgagtatggttgtttttgaagtagtttgtatttgatggagtggtgatggagtaagttttcatgaatgtaaaaacgatcaagtcttctattttcgcctgtggaaaagttggtggggaggtattggtattttgttggagtccttgatgttgcgtcaatgcagtcaaggtctcccatggtatggttgaatgtgtggtttggaggagtgttccaatctccaaggaagattggattggtgaggttgattgacttgatgttggtgttgaagtggtaatagaaatcttctttggttattgtggtgaggttggaaaagttgctggtgtgtgatgaagcgggcgcatatgcaaggcagatatgtatttcagtatcatcaaaggtcagtttgagatcggttatgtatcgattgtgagggcgttggaatgatttttgtatgatggaagtatcaattatttgattatatgttgtgtgattgacaaatatttgcactctggattcttcaatggtatttactggtctgaaatttttattttcaaacatttttagaatttgctctttagtggtggattctgttgtgatgtcatattcagtgagtgctatgatgtcggggttgatggtgttgatttgatttagaaaggtggccgacttggatattgatttaagtttttgtatgttaaataatattaatttaaccatttattatttaatttttgattttttaatatgtaagaaaggaactttggagttgaattgaaaatgaaatctgatttgaaatttgttatgaagtaagaaaaagaacgttctatcatgatagatagatatatattggtttttaccagggtaatttaaaattgttccggaggtgagtgttcatcaaccagtgatgccttaaggcgtttatcagatggttgttgaacatatttgtaagcttcgggatccattgattggtcctcagtttgatcgtttagcgattgtgaattataagcattattttgagtgtttagtgatggttgatcataattagcattttgattgtcaaatgattgttcgttataattattgatttgagtgccgattggttgttggctatcgttatcgatagtgtttggagtgtttccaatgatttcatctgctttgagttgttctaatgctgtttggaaaaattcttgaagggtagcagggaagaaattgttataaatttcgatccattgtggagtagattcagctattttagcgtttttgaaggcatccctcacgtattgttcaggaagtagactaagtccttgtttgatgatttcttgtgaagctgtaggacagctgattagtttatgttcttggtgacaatgagaacattctttttttctaattggacattgttttttgtggtgaccgagaaccttgcagtaagagcagaaacgtaggggggaattgacggtggtagtgatgttatattgttcgtcatctagtgtgacttcacaagtggttggagggactgagtggtgttttaaatcaatgaggacatatgcggatttaattgtggaggttttaaatgctatgtttattggccttttaggcggtttggaaatgtggataatatttccaaagtttgagtaaagttgttgtgctagaggttctgcaagagagtctctaacataagaagggtagctcatttttaaaatgacagcgttttccaatgtattttctggtggagaagagatgtaaatttcgtctgacttttcagcgacttggtgaaatgtagcaatgagtttttggtataataagtcgtcacatagtgctagtgatggtaggagtaggtggaggaaagtgaagttagtcttgatatcctcaaagcaagtttcacaatctgatgcaatatcagaaagatctttgtctttatttaattcatcaaaaatttggtttaaaaaagtgctgattgatttttccgtgaggtttctggagttggatgtaatcttgaatgttgtgtcatactttaggacattagggtactctgttttgttggagagcatttcttcaagttctggagggttgttaaaagcgattttgttggatgcagagacgcgacgatttgtaggatgaaaatttttttggacgttttgttgttgtgttttgtatgtacgaactagttgggcgtaagttggattagcttcattaatgtggtttgtatgagcagtttgagagttgttagaggagttaggaatagctgggtaagtgttattgtttgttagattgtttttgttttgtaaattgttagttgtaggatgagtagtagttgttttttgttgaggaggcaataaattggtctccttcacatatagatcgtaatcagcccaatttggctcaggggatgatataattgtaaatggaggcctgttggattgatccctggcttccgattccgttaattgtcgtgtgttcggcggcataaaagtcggtgattgcagcacctgagtttcgcatatggtctcccactacactactcggtcaggctcttagcagcttaactacagttgatcggacgggaaacggtgctttctgctagatatggccgcaaccgattgcagcacctgagtttcgcatatggtctcccactacactactcggtcaggctcttagcagcttaactacagttgatcggacgggaaacggtgctttctgctagatatggccgcaaccatgccaggaatcgaaccaggggctcaacgatggaaaaagattgcagcacctgagtttcgcatatggtctcccactacactactcggtcaggctcttagcagcttaactacagttgatcggacgggaaacggtgctttctgctagatatggccgcaaccatgccaggaatcgaaccaggggctcaacgatggaaaaagattgcagcacctgagtttcgcatatggtctcccactacactactcggtcaggctcttagcagcttaactacagttgatcggacgggaaacggtgctttctgctagatatggccgcaaccgattgcagcacctgagtttcgcatatggtctcccactacactactcggtcaggctcttagcagcttaactacagttgatcggacgggaaacggtgctttctgctagatatggccgcaaccatgccaggaatcgaaccaggggctcaacgatggaaaaagattgcagcacctgagtttcgcatatggtctcccactacactactcggtcaggctcttagcagcttaactacagttgatcggacgggaaacggtgctttctgctagatatggccgcaaccgattgcagcacctgagtttcgcatatggtctcccactacactactcggtcaggctcttagcagcttaactacagttgatcggacgggaaacggtgctttctgctagatatggccgcaaccatgccaggaatcgaaccaggggctcaacgatggaaaaagattgcagcacctgagtttcgcatatggtctcccactacactactcggtcaggctcttagcagcttaactacagttgatcggacgggaaacggtgctttctgctagatatggccgcaaccatgccaggaatcgaaccaggggctcaacgatggaaaaagattgcagcacctgagtttcgcatatggtctcccactacactactcggtcaggctcttagcagcttaactacagttgatcggacgggaaacggtgctttctgctagatatggccgcaaccatgccaggaatcgaaccaggggctcaacgatggaaaaagattgcagcacctgagtttcgcatatggtctcccactacactactcggtcaggctcttagcagcttaactacagttgatcggacgggaaacggtgctttctgctagatatggccgcaaccgattgcagcacctgagtttcgcatatggtctcccactacactactcggtcaggctcttagcagcttaactacagttgatcggacgggaaacggtgctttctgctagatatggccgcaaccatgccaggaatcgaaccaggggctcaacgatggaaaaagattgcagcacctgagtttcgcatatggtctcccactacactactcggtcaggctcttagcagcttaactacagttgatcggacgggaaacggtgctttctgctagatatggccgcaaccttaaaatataagaaataacaagcatccgttcatttacacaacaagattcgcccgtgtagcgtaatggttaacgcgtttgacttctaatcaaaagattctgggttcgactcccagcatgggtgcaggcgaaatcttcaattatttttttagttttttaatttgttttgtaaattactctttaatgattattaacatgaattttcaaaggttttgagactttttgacaataaactattagtttaatttatttttttggaacataatacatactatacatatttgttaaacatatattaatctaaaccacaatgttaagacaaataacaagaacgaataaaatatcatcaatattaccaattaatgaattaattaaacgtcaattttctataagtaaattacaattaaatgaaaataagaaaataaatgaagaagaaataggtaataataaagaaaagaaattaagtgcacaagagagggcaaatagaattatttatcatgttaaggcaggttcaagacttttattatcatcatggttaattataattgcaggtggagcaacattagttacaagttatttacttgcaactgaattattttcaccatcaggtgaaacatcaacatttaatagagttgttaatttaattgaaaaggatgaattaagtttaaaacttttaggttataatgatgaagaaattaaaaatggtggtataagattaaaggcatatggtggaacaaatcctgatatgtggactagaaataaaccagttcaagcaactaaatttactggtaaggataataaggaacatatgattatgagattctttgttgaaagtaataaaactattggagttgttaatttagaggcaattgaagaaaattttattgaacaagaattaatatttgtttcaattgatgtcaagggtaagaaacattatttagttggtggacctcaattaacttatgctcaaagaaatttaaatttatttaatttatctaatggtttcttaggtgttaaatggggtacaaagaaagattaatttatgattaaatcaatttcaaattcaattttcaaatgtatatagcaaataatctatgtaagtatttttataaactcaaatcaattccattttttttactaaaatttacattataaatacatcaaacagaaaatcaagaatatatttattaaaataaaattagtcaaagaacaataatccattaaagtaaatgcattatttgataaagtaaattccatatcataattataaactaattcatttcgtggttcttcattttcaccttcaattttagaaattccaaataaatatttattccagtcttcaagtacttcttcactacattttttaccatcatgatcataaagtttcatatatttatcaattgatttagtattattactattattaatgtttctaattaacttacctgtattattgaatgaacaatattggtcactttcattattataggtataaaataaatttaaagcaattgaatcacgttgaattttattacaacttgaaaaaactccataatgacctcttttaggatcatcattaattgcaccacaataaacaattgaacaaatatgatctaataaagtattatttaaatgatagttgaaattattataattagcataacatttaatcattgacataatacaatcacatctacttggtctaggtgaatatggcaataaattagtatttaattcattaattgaaatatttgaacataaattattatattgaaatttattttcaattataaatggtgaatcattaataatgaaataatttggcatatgttcaataagaccacaatttaaataatcaccaatgtttttatcaatgaaggataaattatcatgatttggagataatattcgaataccaaagggaattttatccatttctttaaaatgtatataccttttcaaatctcttattgaagctttaacatatggtaaattatgaattgaaaaatcattattaaaagataaagagattgtaaatccaaacatccaattgcctattaaatgattattattttgtctattttttaacatcttattatgtataatatcaataaatgttgttaatgtattataataatcattattccaattttcattattaataattcctaaattaattgaaaaatattcattcctgttattattgggatacttaaaattataacctccatcaactatttgaaataaatctatattccttacattaattaaatcaaaattaaatactgaactatttgatgaataaataagttctcctttattatcaacagttattataggtgattcattaaacggagataataaatttaatgaacttatattaacattaaaaatattataaaattcactatgattatggaaaacatttgcaattattacataattttgtaatataaatggaaagaatatgaatatttgtaaaataactgaagacattgattgtctttaaaggaaagaagatatagggtataatgaaataatgaaatagggcaagacatgcaattattgtacttaaacaaacccaattctctttaatattgcaaaaactgtacgcagattgtatcctcttcttgataaatagagaaaccatgaataaatacgaactttaacccaccatttaagattagatttccaattaaccgacaatttagccttttgttcatcaagtactgcaattggatcatcagtaataataccttcaagtaaggaaacagtaccattttcttcttcttcacataactttataattttctgtaattcaatattatcattaactgtccaaaaccaaagttttaattcattatcccttatccaattaattaattcattacattcattttctctgtatattatcatattaatcattgaaataccatgaattttagcatttggttcattttctaaaactttattataaaatgatttagctaattgaatatcaaatgtaatattaataactttaaaatcttttaaattatcataaatataaaaatcccatctccaaataccgaaaataatcttatccttccaataatcaattccctttaattcattaaataattcaaaaatcaatccatataatttaattggatcattatcagtcttaatatctaacattaattgaattggaattttgtcattacctatcatattttcattaacttcaatacaccaatttaatacatcccttaataatggcattttctcccttggttcaataattgttcttaattgatccaatactccaaaatatggtgttttagtaacatcatattcaataccaaatactcttaatgtatcaatatcatgagcaataattacttgattatctgatgatatatgtaaatcagtttcaacaactttacatccattatcaacagctgattgaaatgcaagtatggtgttttcgggacatgcagatttatacctatagtcaattggttagtatctagtaattatatatcgtattgtaatacatcatacataccctctatgacctgcaagtaagtagctcatcttcttgttgtcatagaaagaaaaagagaaagaaatagagaaaaatgtgtacaacgtggtatttattaagaaattattataaaattgtaaatttacgtagttttatcttgtctttgttgtctttgttgtctgtgtttattttatttgataattaccattaaccatctattaaatcagtccatacctttccttttcagcatcattcattctttggaaaaaatcaattggacttgtaaccatacctaaggctctttgacctaatctatctaaatattttaatccaattaaataacttgcattaacccatccaaatccttcagttgcaacacctttaaatcctgatccttgattaccatattctgcatcaactttatgtggttgtctcatacttgttgcatcatatttttcaacaacaattccattaaaatcaacaaatgataatgtcattaaatataaccatctatatgctaatctttgtgcaatattatgataattatatttatttaatccttcccatacaataatttgatgtggtgcccatgcaaatggataatcccattgtcttgaaggttttgaaattcctatttcaccccttgatttacatgtacctgaaactaatccaccaaattcttcaaattttttaattgaattattaactaatttctctgccttttcattagaacatacacctgcccataatgtataaaatgcagtaactgattcataagtagattgttcccttgtttgaatattataatcgaaataaagtgattctttttcattccacatatatttatcaattaaattacgacgagtttcagctctatcattccaaattttagaagtttcaattaatgttttatttaaattatcatcataataaattaaattatcatcaaaataagttttaattaaaaatgaaatatctttctcatatttaaataataaagaatttaaatcaattgttgctaaatttgcacaaataccttctaatctatatgatgtatcatgaccagattctctaactgcacgatcatgtaaaaaaaaatcatctaattgaggttcattaatttctccattattatatttaatttcaaattcttcatatgataaattatatttttcacagaaaaatgttaaaactgaatggaaatgtgatgcttcagtttctggtggtatacctttaccatctggatgataagttgataatcctgtaattggatctaatcttggacttgacatccaaacattataatattctttaattgcagctaatgttgatcttttcaataaatctaatgattgtttatcataaccttccttttcaatatctctatctttattaatataatcaaaaatttgaattgccatatcagttaaaaatggaggttgagaacgacataaataatacgatctatttgcatttaaaattttaccataatgattaatttcaaaaataaaattttccaacataccaatacaaggttctaaaatatcacaagataataaacctaaagtttcaaaatatgaatcccaaccatattgttcgttaaatctaccacctggtacaatataagggtaaccttctaaatcaccataattatttgatttatgtctaacagctaaagctaaaagacctggtttatcattaattgatttaacaaaatcacttgtaatatcttttggtaaatattcaacttgtaaattaaaatctttatgattttcagcaatttgtttataatagaaaaattgttcattttcattataaggtatataaattcttggtaatttagctaattctgatctaatttttgtatctttagccatatctaaaattgtagattcattaacttgtcttgttaaatttttccaaaatgaagttgtaattaatcttttcaatcttgaaactggattttcatttaatcttgcttcatctaaaatcatttgttttctaccaaatcttttagcaattgttaattcttgtaataaattagataacatataagtacctctaatatcatattgattaaaaccagcagaattaacagtacctaattttaaaacttttggaccattatcatcgattgtaatttgacaattattatcagtatcttcatttgataataattgatcaagagttgaatcaatatcagaaatgaaaaatctttttgaattaactttacttgaggacatatcagcagatccacgtctacggaaagttggagatgaaggtgaaggtgatgataaagctctattcattggagccggagctgggataggtattcctgaacttaaaggtatatgaggagatggatgaataatactattattaagtccgatacctgaactactaccatcgatatcactagtaagatcattttcacttttaaattgagttattctattaatagaactagttgaatgagattttattgaaatatcatcatcatcattcttattcggatcattaagaaccggataatcatcatcatcatcatctgatataacgggagtagcaattgatgaggtggataagttgagtaaagaggtattaggagaattattatttgaattattagtaaatgaacttgtgaatgaatttgaaaatgaatttgaaaatgtaaattttggctttacagccattgatcttgatctaagtctagcaaagggagaagaagagttcgaagggtcagtggtatttgaatagtagctttcggcagggtcatacgggttagttggcatagttatgagctttattcaaaagaaagaaagaagaaagaaagaagaaagaaaagaagaaggcaaataaaataaatgagcctcaattcaagaaaaagaaacagagccttcaaaattacccgccccactgtaatttttaaaacttgctttttttcttcatgtctttcttctatttactattatcaccacttctttctttcttttggtatcacaatgagtactgataaagctgtagaatctgctaaggttgatacccctgaaaccaaggttgaagctaaacctccaactgctaatgtttttgcaatgtttggtgcaaagaaggaaaagaaggaagaagaagaatcaaaggaagacactaaggaagaagacaaggaagatactaaagataatgaagataaagcagatgaagaggaaccagatgttcattttgaaccacttgttaaacttgaacgtgttgaagttaaaactaatgaagaaaatgaagatgttatctttaaagttcgtgcaaaacttttcagatttgataataatgaatggaaggaacgtggtgttggtgatgttaaatttttaaaacataaagaaactggtaaagtacgtattttaatgcgtcgtgataaaactttaaaagtttgtgcaaatcatgcaattactaaaggtaatcaattacgtgctaatgttggtagtgatcgttcttgggtttataatgttgcagctgatgtttcagatggtgaacctgaacctgcaactttagcaattcgttttggttcaaaggaaaatgctgataaatttaaagaagaatgggaaaaaattgctaactagagattattttctattctataaattgtttataaaaaaattgtatagataaagattaataataactatttatcatcaacatcaatatctctatctctatctctaataccaggtccttttcttaatggccatttaattaatattttcaacatttcaaaaactccaaattctggccacaatacatcaataaattcaattgttgaactatcacttgcttcccataataagaaatcacttaatcttctaacacctgctgttcgtataattaaatctgccttgggacaattacttggtccagtccacatatcattacttatactttcctctgtaatattatcactatctccattaacaatattcttatacattgattgaacaatatctgctcttgatgtataacaaaagcaaacatttaaaattgcataattatatttctctgtatctttttcaacttttaataatgcatttttaacatcatcactaactaaacttaaatctccaataattcgtatctttacaccatatttttcacataattcacccttatttgaaacaattttcattttatttttagctaattccattaatgcattaatttcattatttgatcttttaaaattttcagtagagaatgcaaaaactgttgcacatctaactcctgatttataacaaactcctaatatatttgtcatactatcaaatccagctgcatgaccttcattaatacctgataatttttgtcttgcaaatgttctattaccatccattataaatgcaatatgattaggtactgaaccagttgaaattgcctttgatattaattgtgcactccattctccaatctcctttataacaggaaatgtccatatccagtccatactgtgttatatattatacctttctttccaatagaaaagacattaatatatcaaataaactgaaaaattgaaaaatttaaatttttgagaaattcatgtagtcagcttcttcttcttccttcttctttatataatatataccttttctttctttaaaggacaaaagagcaatgttatcacgttcattaaaagcaataccccgtcatagatatcagaaatctcttataattataaataaaagactttcatcaacttttgcaactgcaattgaaactgctgaaaaattagttcaacctaaaacttctgcttcatctccattagatccatttgcaatggtttcagctgaaatggcaactttaggtaaacatatctcacaattaattggtagtggacatcccgttttaaatagagttgcatcatattattttgaagctgaaggtaaaaatgttagaccattaattgtacttttattatcaaaggcattatctgaaattccaattaatgaaagaaatagaataattattgatcaatatgatgttaatactcaaaaagaatttaaaggtactccaaaggcattttcatttgcaggtgctgatcctttaaaatcaatttctccattaaatattttacatggtataaatccaaatataattttaaatcctttaagtagaccaatgattgatcaagatgaaaaatcaattcaattagatattaaaaatggtatattaccaaaacagagaagattagctgaaattactgaaatgattcatacagcttcacttttacatgatgatgttatagatttttcagattcaagaagaggtagagaaagtggtaatattgcattctctaataaaatggcaattttagctggtgatttcttacttggtagagcttcagtatctcttggtaggttacgtaattctgaagttgttgaattaatgtcaactgcaattgcaaatttagttgaaggtgaatttatgcaattgaaaaatactgttataaatccagatttaacaacaattaataatgatggtcaattaaagaaaattcctttaccaactggtaaagtacctgttaaagttcatgaatattcaattaatggtacatcaaatattatttctcataatgataatgttgaagcagcatttcaatattatttacataaaacttatttaaaaactgcatcattaatgtcaaaatcttcaagatcaacagcaattttagcaggttgtaatgaagaattaattgaaaattgttatcaatttggtagaaatttaggtttatgcttccaaattgttgatgatatgttagattatacaacaactgctgaattattaggtaaacctgcaggtgcagatttaaaattaggattagcaactgctccagtacttttcgcttggaaggataaacctgaattagctccattaattgcacgtaaatttagtcaaaatggtgatgttgaaattgctaaaattgcagttgatgaaacaaatggtgttcaaaaaactcttgaattagcaattaaatatagagatgatgcattaaataatttaagagttttacctgaatcatcagctagaagtgcacttgaattattaacaaattcaattattactagaaataaatagtatctttaactttactttactttactttactttcttttaacgatttaattaatgattcattctttacatagataaacctgtatatacgaaaatttaaattaatatttaacatagtagtaacacaaagcctgtacttccttttaagtgaatcatgtctctcttttatagtaaaatatttggtgtacagataatcagttgagccccatttattgatgatattttcattcaatacatgaataatttctttatggacattactttctttttacatgtttgttggtatggaataagtataaactttaccattctattataatgaaatctagaaattctgctcatatacctcaagttgttatacgttcatttgcaaatagggattcttatccacaaacaaatacacttgatcaatcaacatttgatgaatatatgaatgaatttgatgaacaatcaagtatagaatcatcatcatcatcatcaagtgaaaatagtagtgattcagagaaatctaaaaaaaagataaagaaacaaattaaggataaacttaatataatagagaaagttgaaattaattcaaatactacattattatcatcattatcatcatcatcatcacctaaacctaaagaaacaggtggatatcattatttagaagctaaggaagctattaaggaaattaataaaggtaaaagtattttaatttctatagataatgaatttttcgaaaaatcagtttcaaaagtaactgaaattggtatttcaatttataatcctaattatcaacaaaattcattattccctcatataattaatattcatttcattattaaagaatttattaatttaagaaatggttcatttgtacctgattctaaaatgaataatataacaggtcaatcaattataatttcaattaaggatataccaaatgcattaaaatcaatatttgataaattacctcaagattcatttattgttggacataatatttcaggtgatttaacaagttttaaatatcttaattataaaattccaaataattttaaaataattgatacaactaaattatggtataattttattaattcaaaaaatgtaaaatcatcactttcatttattttaaatatacttaatataccacattcatttttacataatggtgttaatgattcttattatacattattagtttgtttaacattatcaagtgaaaatttatgtaagaatttaaaattaacaaaatttaaaaatattattgaagagaataataatagttctgatgaagaagataatttagaaattagaaaagctaaaattcaaaaacttaaagatgagaaaccaccattatttgatgaatttacaccagaagttgcagatattaaacttaaaagatgggaaaggaaacagaaaaaagctattgaaagattaattaaaaatgaaaaactaactaagggtgatgtctttgattcaattaaaattagatgttcattagatgataaagtaatttcaaataagggtaaaatatcaacaattaaaaaatttaaaaataaaaatccaattgtaaatactttttataaaccaacaaaatatgaaaataatgaattaaatcaattattaaatgaattaacattataatatataatatatattatatataaactactttattaaatctttattaactaaagttgcagattttgtcatattattaactttataaataccaactaaactttcagctaattcaaacatattatttcttaatgaaataacaataaattgtgcatcctttgttcttgatttaatataatttgcaacaatactaacatttttaaaatctaatgctgcatcaatttcatccataacatataatggagttggtttataatgatgtaatgcgaaaactaatgctaatgaagctaatgttttctcaccacctgataaattagaaattgtcctccatgatttctttggtggcataactgaaaagataataccttcagagaatgcatcatgagaatcataatattctaattctgccataccaccagctgtaattaaattatacattccctttaaagtaattgaaatttcatcaaaaccagctttaaattcattatgtcttttatcatttaattctttactctttaatttaatttcttcaagattttgttttgtaattttaacatcttcctcttgttccttaaattttttttctttatctccataaattaaaagtaaatctaaattaacatttgaatcacttaattcaatttttaaactatcaattgaatcacctaatgtttttaaatccatattacttaattcttcttcaccatcttcattcatataaatattttcatcaattttaatttccatttgaattaaatcatttctaattttatcatctttagaaatccatgaaatatatggttcaacatcacgaatttcaatattattaatttcattaattgcatgattaacttcaatttcaaaatcttttaacatttgatcaattctatttatctttttcaatgtatcatttgttaattttgaattttcttcaattttaatattttcatcatcaattttttcatcaatttcaattattttattagcaatttcttcatgtttaattgaaatttttttatattcattatcaattttttcatattcttcattaattttattaaaattttcatttaatttattaattatttcatttaattcatttatttgaatttcattattttcaataattttcaaaattttattattttgactttgtaatttagttacctttaattcatcattttccttcatttcaatttttaaattaattgaatcctttaatgattgaactttagcagtttgtgttttcaatctaataccaccaatatctaaaattttattctgtaattcatcaatttgcatttgtaaatgatttgaattttcttcaagtttagatttttcattggaaatgataattaattcatttttataaattttaattttctcttttaataattgaatttcattaatatttttctcatcattttcatttaatattttattcaattcattaatttcaatatttaaatttttattatcaattgttaaccttaaaatttctgatgtcatccttggtatctcttcctcagaattacgtaaaatttgatccatctttctataagaattttctaaatttttataatgatcctctctttcaaataattcatccttcattaattgtaattcatttggtgaaattatatcattcatatttaaatttgaattattatttgatgatgaagataatctcataccacctttattaactctattaccaccacctgtcattgtaccactaacatcaactaatttcccatctaatgtaacaactctccatcttttagaacttccaaatgcaactctatttgcaatttctaaattatctgtaactaaagtatcatacattgaactatagaaagcaggtttaaatttttcatcaattggtttaattaaatcaaataatcttggtacattttcaggtgtatttattttattaaggttaaattttcttaatttttccaatacaataaatttaccaaaacctaaattatttgatcttaaatattgaatacaattttgtgcatcattaacggtatcaacaacataatcatttaatgaaccaacacctgttgaaattgctatatcatatttatcatcaattatacctaaatcacctaatttaccataaaatccattaattctaccagtttcctttaatttattaagagcatttaaaactttattttgagattcaacattagaaactttaaattttgcatcatcaattttattatttaaattttttaattcaatttctaattttttcaattcattaccagcaatttggaaatcttttttatgtcttgaaatatttgaattaaaagtatttttcttttcattaatggaattaattttagaattatttaaatttaattgttcatttttatcaattaataattttttcaatttatccttttcattaattaatgaatttaattgattttctaaaagtattaagttctgaatttttaatattataattactttgattttgatcaattttatttttccaaggttctaatttattttgtaatttttcaatttcaattgaaaattttttcgtttcagttgataattcagatttaattttatttaattcattattttctaattttaaattctcattaaattcattaatttcattatcataatttaataaatttgaatttaattctaataattcattttcatttgatttaaaatttttattatttgaatctaaagttttattaaatttttcaattttttattattaattttcaaattttcattaattgaaactttttccttttcaaaaaattttaaatcatccttaaatttattaattttaatatttaaatttgataaattattatttaattttaatttttcatctttaaatttatcaatattttttttaaatttttcaatatttaataaatcatctttaattttttcatttaattcatcccttttaaaagtatatttattaattgaaattttatttttaattttagttaaattccaatatttaaaagtttcatcttttaaaagtttctctaatttaagataatctaaagctttatttttagaaatttctaaattatggaaatcatccttagcaaaattaaatcttttctccttttcattgaaaatatcttgtaaattatcaatttgattattaattaattcaatttcttccttataatgttgaagtaccaattatatcttctaaatattctaataaaccatcatcattatcattttcagcctttggtttcatttgagaaatcatttcaacttcaccttgtaaaataagaaatcttttatgatctaaatcaataccttcactttttaataaattagtaacatttgtataattactttgtaaattattaatataataaatactattattattaatagttgcctttcttgaaactatcaaattcactattttcaataattgttggattatttaaattattaccattattatcataattatcaataatttttttaaaatgaatatcaactttacaaaattgtaaatttggataattttcagaattatgaattaattcctttaatttagtttgtctcatctttgaagctctaaaaccgaaaacaaataacattgaatcaataacatttgatttacctgaaccatttggaccaacaactgcagagaatgattgatgaaatggaccaatttcttgtttacctgcataagatttaaaatttgttaaaactaatttctctataactaaacgaggttttgcaagtattaggagttgattcgttattatgtaataatttttgtattgcctttcttggagattgaattggttcaataccaattactgatatattattattatcaatattattatcatttatgttatcaatactattattattattattattaaatatagcagaactattagctattatatcattattattaagttgagtattctgactttctactagcattctacaagtaaggaaggggttaatctacagagaatctattgtctaatccagaaagaaaaaggtattgtaaaacacgtaaaatgcaaatattcatgtaaacaaaggtaagcatctcacaaaaatatattacgtaatacaatcacgtgacactgccataaaatcaacgtgtcagcaacagtcacgtgattattacgtaatactatataatattataattattatcccctcactttaaaattaatattctcagctacaaccaattgaattgaatatattttcaattagtattggtattggtataagtatagcatattattatatcattaaataatcaaattcaattatggctattcatgaattacctgaactttgtatgtattatattatatcttattatctataactttacattatactaacatttaattatagtatcacatgatgaaatgaagaaaaatcaaattccaattccatttagggatagatgtgcaaaattattaattccacttaataaatgtagaaaaaatggtggttatttaccttggacttgtgttgaatgagagacatgattatgaacattgtcaatatttagattttaagagaagaattaaagaattagaagaatttaaaaagaatagagatagtaatagtactgtatagagagtacgaagtactctctattcatatacttataaaatcatatacttatacaatcatatcatatcatcatatcaattatatagattataatattataatattaaaagaaaattatttatttcctaattgagtaattaatttattatatcccctaataccaccataccaccatctcctttctttttaaataatggttaaaacatatccttcaatatacttatcaaataaaatacctttaataccttcaagtccaatactatcatcatcttcttcatcacctgtaaaaaaaattttaattaataaatttaatattacaatacaagaggatgatattatagaagaagagggtaatattgtaaataaattagataatataagttatggtaaattaagtgaaacaacatttgcaaaattcaacattacttatcaattcttttatattaataaaattgtagaaagttttaattataatacccaatacttcaaatactaatattaaagatttattattaaattatctcaaaaataaacttatattatcaaatacaaataattgtaaatcaaaaattgtaattttaactccaagacctcaagcttcttggtttaaacgtaaattatttaatcttaaaattaaaaatataaaaattgatgataatcaatatatcctactcaaagtttggaaaaattatgctcaaattgttaaacaatatttagatgaaattttataattatatagctatataatagtaacttaccatgctctaaatggaacccaaatatcaataacttttgcattttctttatcattatcaaatatataataccatggataacaagcagctgtaatacaactatgttgtggtaaaatttcaactcttgtacttaatggtattaatttacaattatcatcattaggtattaaaattccatgttcttgacttaatctaccaataatccaatctccataacctttcggtgaaataatattaccaaatcctttaattgaaccaatttctcttgaaattgccaatacacctgcattaattaattgttcaccaggtttaatattacctctattcaggataattggataaaatatctgctaaaactttacatgaaatttcatttgaggatatacaacctgtacctaattgttgtaaatcattaaatggataattacctgcatgtaattctaattcaccaaataattccccaagggaattaatttcattattaataattttacttgaatgacttgttggtgttgaaccaattgaaataactaattttaattcattattaaatgaaattgccttttcacatgctttattaccatgattaatttcttcaattaataatttcatagcttgtttaatattctttgatccatatgcatgtcctgcatgacaataaaatccatataatgaaataaatttcataaattcattatcaattactaatgatttaataatttcatctaattcattatcatcattagttaatcctgcacgatttgtacctaaattaattttaatgaaaactgaccattttttcaaattcctattcttttcactaaattttttcaaaatctctaattgtttaaaattatcaatcattaaacgtaattttaaatttggatatttttcagtaatttcaaataattcattcaatttactttcaataactggtaaactaaataaaatatcattaattaatccattatcaactaatgacattaaattccatgcctcatttaatgttgaaacaattattctatctgtctttaaatcatctgtacctaattgtaacattgtaccttccttagttttatgagttttaacatgagcacggaattttgcattaatattctttgcattatttaacattttatcacaattaatcttaacttgattttgattaattataaaacatggtgttggtaattcattctttgttttacccttaaattcattaattaataattgtttatcagctaatggtgtaaatttatatggatatgacatattaatttgtctaatgaaagttcataataattcatcatcatcattattgaatactataccatccttttatagacattgatttgaaaataaagaaagaaagataaatgaaaagatattatattaaaaccgacttctcaaccgacatataaaatgtatattttcatcaacttttcttattctttcatcaacttttcctttccttttgtataagcttattttttattccaaagtcgtatcctcaaggaaaaattgatgttataagctctctctgacacatgaaccataaatattgaaaaatatatctgttatttatttcatatatttttcaatattcatcgttttgtgccaaatacagtttataacattaactttgaggtaataattgttcatactttaaaccccccctttaaataatcttttataagtttaaataacaatgattctaataatttacagtcagagagaggtatcacatttttacacttctcttcttaacccaagaataaacatgacttctttctggaaatggtccaatttcataaataatcgccatatctttataatatttatccttaattgcattaaatatttcaaattttggttgataattatcaatatatttttgaaaactctatatccaatttccttatttctctcataacatttttcaacatgattcccaaaagttttcataattacaattctatgaagacaatcaaaaactattgtaaattttctattacaaccatcaaatggaaacatacaacctttggtagtaattgtaacaaaatttgaaaaagattttataaattattgaaggtgtacatattattcgaactttaaagttagcacatcacgtgacccacgcacataaataataaccacagtgaaacccaccaccaaagccaacactgtaagtaatatgaagcttattagtgatataaagtgaatatctatattataatcaatagagacattacaagtggtatagtctgaaggatagactttaataataatgataatcaaagagattaatggaaataagatttaatgaagaaatatgatgaataatttaataaaccaatgttgacagaaaatcaacggttatgaaaaatgatgggataggatcattaattaatttattatatacaacttctccactaattgatttagtcacattatattacaactaagaactgaataatagattccccacatggagaatcgggctggcttgtgagataattaattacagttctttaaagtatataaataacatgtataagctctcttgagcgggacatctcaatatatgagagttggttttagatagaacaagttttggataacttattatctaactttatcttaactaactactcgcataccagttccatcgacagtattcgcatagtagtattaagtacaattagttacagttattattctttattgtattgaaaagattcaacataagtattaattatttgattacgtaatattttacgtacactatctacaatatcctcctaatactttacaaacacaacaaaagccgttctagtatagtggtaagtacgcatcgttgtggccgatgagacccaggttcgattcctgggagcggcacttttttttttaaacggctcatttaaacaattgaattgatttaacgtgtttttacttacttttaataacttctttctttttgcattctttaataatataaccaatgtcaatacctatttatatcatatgaaatgaaactttcacttagaattgatcaagtaactaatttaagacaaatattaggatttcttttattaattaggaaaaattgtattttaaaatttcaaattgatcaaattaatataatttcaattgatcaagataatttaacatcaactccaattatttggtgtactattaataaaaaaatttttaaaaaatatgaagttattgcaaaggataatttaattggaattgaattaaatattgaaccattatttcaaattttgaaaaattttgaaaaatcaatgtcaacaactgatttaagtattaaattaactagaagtgataatactaataataatagtagttctacgaatactactactaataaaagaaatgtttatttagcattacaatttaataatagtattacaatgaataatgaaataactcattcatttagtataccagttgatttattaagaatttcatcattagataaaattagaatgccaatattaaaaaatattcatttgataattgatatgaatagaactttaataccattatttaaaagaattgaaagatataaggcaactgaatttattaatattgtaattaataaattaggtgaattaaagattaaaatgcatgatgatggtaaaaatataagtttaaaatggaaaaatttattagatacttgtaaacctgaagatgttgatacacagattaataatatagatgaaactgatttagatatgattaatgatattaatattaaaattagaactaaatggtggaattttgtttcaagattacttgaaatttgtgatatattaccattttatataattgataatggttgtgcatttcattgtaatgttgaagatgaacaaaattattcaatggattattatatacctggtaaaattatataaatttagatttagtgagtttttgcaaattcttcaataaattcacataataatttagttgatttaattgtaactgcattatataatgaagctctcataccaccaactgatctatgaccctttaatcctgataaattctttttttctgcctctgataaaaattcattatctaaactaccatctttaatagtgaaaacaatattcattcttgatctaacatctttactaactggtaatttataaacatttggatatttatctaaaatatcataaagcatatttgatttaataatattttcctcttcttgaacatttaatccacccttttcaattaaattttttaaaactaaattaacaatatgaactgtaaatgttggaattgtattataagcagaatcatttttaacaactgttggataatgaaatgcaattggtacaattggtacatttaattttttcaattcttcaacatttgcttgttcaagtaatgattttttaataatataaattgaaatacctgcaataccaacatttttttgtgcacctgcaaatataagtccatatttactaacatcaacttttttagataagaaatttgatgacatatcactaactaattcaacatttgggaatttatcaaatgggaaatttctaaattcaactccattaacagtttcattatcacaatgataaataaatgaaatttcatttaaatttgatggtaaatcccatttatcaattgatggaattgtaccaaatttaccatcaattttctttgtatcaactaatattttaggattataacctaatctttcagcttcctcatatgcctttttagaccatgtaccatcaattatataatatggtgtaccaattttaccagttttcttaatatgagatgcagttaaatttgcaacaattgatgaaaatcctgttgtaccaccaccttgtaaaaagaaaacttcatgtgtatcaggaatatctaataatttagttaattgttcctttgtttcatcaataatggaaacacctgctttagaacgatgtgaaatttcacctgctccaataccaatattttggaaattaattaaatcttttgcagcttgttgtaaaactgatgttggtaataatgcaggtcctgcaccgtaataattaggttcctctctatctaatgacattgtatagtttgtgatttaatatatgattcaaaagaaaagaaatgacatatatacttcatataaagataaaaattcattgtgaaaaataatttgatttgataattagataattaatcagagtcaatttacttatttaatgagtcatttaatgtaaatatatatgttatgttaagtatggtatatcatctatatacctacatcggattaatacatttctaaataaataaagtatatataataatatataataatcatatataagatataaatataaactattgtttcttatcatgttcattaaacttattataattttcagccttttcataaattaaaccttcaattttaccatctttataaatttctctttgcttaaggaaatctaatggtaataatgaaggccaattaacatattgaataccatttttaatcatgaaaaaaaatgaaaatccacttaataatgacataattgaaataaatgaaatatttttaatttcccaaattgaacctttagggaacattattgtaccaattataattaataaaccaacaatgaaaatatatggaattgattgatgaaatgaaggtctttgatctttaaatggtgaattatttaatttatatggtaatatattacctaaaaataaatcaaaaccatcttgtcttgaaccatctaaataattatttttcaaatatcttgtaattgaattaattaaatcatttaatgcacctttctttgttcttttaccagttcttgtataatcagttttcaatgcacctgtacctgaataagcatttgaaacataatctgcattatctgcccaaatactttggaaaattaaattaaatttaaaatcaattttctcccattccaattcaccattaattatttgattatcaattaattgcctttgtaaaaaccatctacctaacattgattgaacaacattagttctatctaaacaatccatacaattagttctaacaatatgactttgagttttttcaattataaaattttcattaattgtaaataatgaataatcattttgtgataatcccatttcaattaaatgatttaataataatttaactctatcccatctcattttactacattcatgatggaaatcaaaataagtatatttaatattttcatcaccaagtgcagaaattgcattttcataagctaatttaattggtttttcataacctgattgattaactaaattaactaaataattacaaccataatttgaaattgatttatcaaaatgtaatctagttggtaaaatatcattaccatcagcaattaataaatttggtttatattttaaattattcatttccccccaataaacaggtactgaacctctaatttgtaaataagttgaaattttatcaccattattactatgattaattaaaaattgttcagtttcattaaaatttgcaacattaccatttttatcaatacctcttctaaaatatcttgtaccagctctaaatcttgatcttcttgtaattaaaccaaatgtaattggtttttgattaattgttgtctttgtaaatttacaataaccataaataactggtaatataaaattagatataattaaatttgaatttgataattcaactaaatttgatgaaatgaaaaaattccacataaattcattattaaaacttaatgaattttcataattttgtttaccaaacgaattagttaaatcatatgtatatgaaaaatataatgttgcagtatttaaatgattttgtaaaatatttaaatatttaacttcatcttcatcaggttttaatttcttatttaatggtaaaataattgttgaatctattttataaatggttttatcattataaatagtaccaacattagttgcacctgctgcaagaatgatataataattagaattaagtctaataacacctaataaacctgaaattgattggaaacttgtcttaaaagtttgtttatcaacatcaactgtcttaatctcacctgattcattaataagtaataattgtgattgtgaatcaccagctaattgaaatacataaccctctgcagtctctgcatatcttaacgatgtagtagctaccatctctgtctagaatagaacaatacaacctattcaatagaaaagaaatcaaaagaaatcaaaagaaaagaatcatcaaaattaattatataagccattatacaacctacagtctcttcctttgacgacgtgatcttataccattggacttcctaactaaatggtcaatctccctacgtttaaggtctaactcctgctctgcactcaactgattctccttatcattatcattatcataccctcttctggcaattatcatatctgcaagtgttacttcctttgattggataagtttacaatatacatcaatattatcactaatacattcaaataccatcctattatcaatctcctcaatcatcttatactgagtcatatcataggcatatctactcattgttgtgaatttataattaggttgacatgtcattaaatcaatttgtgttccaattcgaatcatttgataaatttcactcatatgtctgtctttagcaattacatatacaaaatatgcatgattaaaggattcttgttgaatcttaatcctaccttcaatccatttatcaatattacccataattctctcaggattatgtcttaatgtaaatgctcctaaatatttagcaatttcaattttaaattctaatgtatcttcaaatttcattaactgaaatggtataactccactaacactattatattctccacttaaaatcatatcaaatatattacccctaccattaaatgaatgttccataatataataattaaatttattcttatatttattataatattcattaaaatgattttcaactctttccattataattgaatgaatatttttccatttaccaactccattatatgttataaacatttcaacaaaatcattactattcatataataaaatccagtattatcatcagttatcttatagagaagaataaatgatggatcatatttatcatcaataccatctttaataatttgatcaaaattaagattatatttggataccttgtcactgagttccttattctctttaataaaatcaataaatgatacatcaaatgaataatgggcttttaatctctcatatttcatatcattaactttatccgttattctctttaacttctcatcctcttcatcatattcatcatcattatcatcattatcatcattattatcacccctaatagcccttttagtattctcagcttcaagtctagctgaatgttttaaaacatctcccatatgtctaagaagaaatgattgccttttcataaactgttcctcatctattttaaatgggacattcttcaaacaatattttgttaaaactagtggtcgtgattggagttggtgactttcctttattttatcatcagtatttatcttaaccatttgacctttatccttagatattccatcaatattaatttcacttaatgcattaaaattaaataaatatccaacatttttaatattatcatcaattttatcacaattattataattataattataatcattattcaatgaattagttaaaatttccttaatattattaatcttaatcaattttggtttattcttaatttgttcaatatattcattaattatctttttcttaactaaattatcaactttaactttccatccaactctaataatttcacccttagaattaattgatctaaaattatttaaatgataaatatcaccataaatttcaattaatgatttataaaattcagatgctaatgtaccttcattaattaattttttatgaacccaatcagtattaatatataatggatgagttatcttaactaatggatccttaattctattctcaacaattttcctaatatttcgaagtcttaattcagaatcttcatattccttaaatccaatatatcttgatgcattagcaggtataggtattgaatcatataatttattattcattatatcattttctttatcaattgattcaataaaattttcaatatctgattcaatattataatcaaaagttgatctaggtgttgatcttgatcttgatttaaatttaagtttagatttaaatttagatattttaatatctttttcatttcttatccgtttatcaatctctaatttcatcctttgactttcctttaatgaatttttcaattgataatgtgaacttttaatataaatatttaataatttggaatatttacccataaattgtccagttaaaagataacttacaaatgcaatataattaatattaccttctaacataagtaaatggaaatcatcactatataaatattcaattgatgaataatcattaagtataacaattgatctagtttggaaaaatctaggtacatcaaatttatttttagaattaacattaagaaatgtaactattaaactatcatcaatattaaaagttttaaaattacaataattttgaattaatgataaatcatttaatttaaaacaattaacaaaataattataattacaattggagaatctccaaagaaatttaggattttgtaaatataatgaaatttcaattgattcaggttcaaaattacttggtgatatattaaagaataatttatctattttacttatccttttaggatcttcaatacaatatctaattaatgaccattgataaatcataaatatttgtctctgtaaaataattgatgcaattctatttaaatctttacaatcaaaattcttatattttgatctacatgcttcaataaattgtccagtaccataaattgtattagttgtaggtgcaattattaattctcttacattattggtcatattaaccaccccaggtgtgaataacatcgtatattggtttgctatagcttataaaacaagtaaaagtaaggtggaagcaaaaaaaaagggaaaaagtatatattaaacagggcatttttcatatatttaataatctaacatttcaattactgggaaatctttaatagttggaacaggtatttcatcaacataataaataataccattatcatcaatcctttcacgatctcttttatcaactgtatatatttcaacaacattatcctttaataattgtaaaatattaataaaatttgattgaattatatatgccttttcaatcatatttcttttaatcattgcatttaataatttaattgtatcaggttttgtaacttctaatctatcaattaatctaccaattgaactaattaaatattcttcttcatatatagtacctttcttaccacgagcttttttacgttcctctcttctcttattctttgctgtacgtctagatgcacctgttttagcagtacctgatgttttacctgtatatcttgtaaaaaaagattccttagttgatgcaattgatggagcaattgaaacattatctggtgtattttcttcatttatttctccatagaatgaatatggatcatttaatttcttttcacgtaattcttttaatctcttcatttgtgaaattatttgattattacaatctgctaataattcagcaattgtagcaaatccttcattaattgatggatcaataattgtttcaattaattttaattgattttcttcataacataattgaattgcagttgaatattcatattctttaccatataattctaatgcatttgataaattatttaaatatttataactaatatatgcagctgatttataatcatgaataattgttaaactatcaattaatttattacatgtatcttctaatttatccttaaattcattcattaatgaaattgtaattgcctctctccaatttttacctaaaatataattttccaaagcattattaaaatcttttaatttttcataaataattgcactttcactatatttttgattagaatgtaaatatgatgcaaaaaattttaaaattaaattataattaatttcatcatatttatataattttaatgcatgtttatataattcattatcaataatataatcaattatttcatcttgaatattagaacattctttaataggtattttaattaatgattctaatgcttttgaataatttttcaaataattatcaattgaaaatttcattcttaattcactttcttcatataatttttgtaaaaatggtaaatattcctttggatccttttgactttgttgtgcaattattaatgctaatggaatattataaatacttaatgcaatatcatataatttattaatatctaaaaggaaacataaatgttgaacagatttttcaatttctaaatcatttgtaaatgttgaaattaattctaatgcttctttagctcttggaggtttttgtgatgcatatgctgtaataattgattgtaaatatttttccttatattcaatattattaattaaaatttcaagaattgaatcacaaatttttctaactttttccttacctttctcaaattgaataagttttaattttttaacatcagtaataagttcttcaatatggggattttcaatatcagatttttcagtttctttatatttagtttgacaaacatcttcctccaataaacaagaaatgaataaatctaaatattcaactttacctaattgattaataaaatgttttaaattattgaaaaataattcaggattataatcatgtaaaatatctaatgaaattctatgagttctacaaatcataaaagcattataataatttaatttattaatattcaaacgtatatcatttaaaactaaaattcttggataaattgtctctaaattacctcttggagcttgtaaaataactaatgattttgatggacatgaattaactaatattgaacctctttcaattgatctaattctttcatcatgattaatatcatttgaagttatgacaaattcttcatcattaatgaaaaattcattatttaaattaataaattttaattcatgttgtgcagttgtaaataaaagatatgaatcagttgttaacattgatgtaacaccatttgatataagtttattatttgaatataatttacctgaaatagttaaaccaattggtaaaatagtggtaaattcttcttcagtattaatattaacaactttaaaatcataacaaatttcagggaattgtccaataattgaattatcaataatatttaaaatttgcccattaatatattcaacaaataataaatcattcatataagaaattttaataactttataatttaattcaattatatcattaaatgaaacatctaaaaggtttaattttaataatttagaattattttcttcatcaaataatatataaataaatttatcaacaattaaaatttgtctaacaaagtaatctggattaatatcaaaattatttaattcattaaaattccatgtatcgtcaatactattttcaaacaatgtaactttattatttgttaaaattgccaaaaatttattatttgaagaaattgaattactaataatattatcattaacaaagatatctctataagaaattggtggaggtacattagccttagcaaatggtgttaacatacaattattaccatcaataactaaactaacacctttatcattatttaatgaagttgaaccaattgtattaatatatgaaaaatcaataatttttaaattattatcataagtaccaataattaatttaaaaggtttttcaggatgaaattttgtaaatttaattttagaatttaatttaatttcttgttttaaataccaatgataatttttaacataccataattgaattgaattttccaattgtaataataaaatttcagaatttgatgaccaatcaatatttaatatattatcagttaagggatttaatcttgaattaaattcaccatgtcttaaaccatttttttcaaagaaaataatatctaaaacataatcattaatttcaggatctgaatcgaattttctttgagttgaaacaataattgaaccttgaggtttccaagctaatgaatgttcatgaccatcaattggttcactaattgaaattaattgaccatctcttgaataaactctaattgatcttctctttaaattatcaatttcttcaataattgaaattgaaaaaaattgacaatcacctctccaagaaattgaaacattttttaaatcaaattcagttaatttacccatttgtttaaatgaaattgttggatcacataaaattgcattttcactatcaatatttaaacctgcatttttcaaaatttctctatctctctctaattgttttttacctttacctttaaattgtgtctcttctttaccccaacctatggaaacttgattattaaaagatttaatatcatttgaatcaattgaagtttccaatattaaatctaaatttcttgaaaataataataatttataatcattagtaattaaagttaaaatttcttcatcataagaccattttgcacttaaaatacctgcatcaattgtaccaataatttcaataattgaattattttcatcaattccatcataagttgaagaaattatatcaccatttgataatataataataaattgattaatatcctctaaatgagcaattgatttaataattgaatttgaatcattaatttcaactattgataaaatttttaaattaccaaatttatctaattgttgaaattcaattaaattattatttgataaaataattgttaaagaatctgaaattaaatcaaaacaagtatcaataagatttaaatcaggagcagatataccatcagttatgatggtattttgattaagaatttgtaaattcttcattgcctaagaaagagggtcttattaatgattatatactctatcaaaattttttttccattcatgttagtatttcagtaataatttttttttcctttaattttagttttaattttagttttaattttcatttacgtaatactattataaattaactgataattacctaatatatactacaatatactcaccattacgagataccaaatgcaatactgaaaagaaacaaagaagaagaagaagaaccaattaaaaagaacaccaaaaagagggcaaaccaatctatttaaatagtttttgtaaaataaagtggaatgagccttcaaaatgggtttaaatctaattaagaaaaatttaatgagccttcactatttattattacgtaacgtttataaaatatactatagacaagtaagagaataactatattattaatttgaatcagctcttgattgaacaatatcccaatcaattgaagctaaaacatttttaatatattcttgtttaccataaactccataatctcttaaataatatgaaggatttgaaggaattgcaaataatggatgtgaattaaatttaaaattattaactttttgagcttccttaattgttggaattgtatgtttatctgatctaattgaattattatcttgattaattgatttatttttcctattattaaattcttcacctgtttgaattctatttgataataaatcatatggtgaaccattattataagtattaacaattgttaattttttaaaattttcataagttttactatttgcaacataattatatgtaacccaagtattaccattacccttaattgataaaattgaatcatttaataaagttaaaaattcttcaactgaattaaatgatgatttaattaatgataaaaattttggtgatgttggtatattatttattgaaattttatttgtctctaataatgcattagcattaggttttctcaactcaccacttcttgattttaaaattgatgtaaaataataataattataaatatttgaagataaatcgaaaatatatgaattattatcataatttattgaacatttctctaataaatttttatattgaccaataattggattatttgatgcatccttatgttgagatttaaatgaatcaatataatttttataataagaatcagataatgcctcttttaaagattctaaattcattgattgtccattatgtaaatcttttaaagtagaatctgagaataaaccttttaaaccagtattatttgcaattgaattattaattaattcaactgttggtaatttaatattatcaataattatactatcattgttggtagtattattattaatattattattaatattaagttcctgtctagtaaatgataaattagagaaacatctataaccaattctactcttccccaatgttattctaatcattcttgtcttgtctataatacaatatagtataccttccaatagtaaaatttcagtgaaataatttttctcgtcgcagtacgtaaagtctattaatattaatactcttttcgaaggcaaagttacccggtttatagggggtatattatacctctattatcactgtatctctgtactacccacatctacaatatcacaatacacacaacttcactatactgtaccctactagacactactacactctactagactctaccaatataaaacaaaacaaaaaagaaaagaaaagaagtaaaaatcaaatagtaaaaccttccatccaatttttattattatatcaacatcaccaaattaccttaaacacttgtttattaatctttattttattttattttattatactttatcaataggtaacttaatatctacttaaactacaaaggagattacttctcatctattatatacatacatacatatattatattcattatctatctatctatcgtatacccattcatcccatataataagtcattattttatatttactatactatacttcaataaataaataaataaataacataaaacaacataattacacaacataatgacagatattcaagaagcagatgttgattctattattgatagattattagatgttagaggttcaagacctggtaaacaagttcaattacaagaaaatgaaattaaatatttatgtacaaaggcaagagaaattttcattcaacaaccaattttattagaattagaggcaccaattaaaatttgtggtgatattcatggtcaatattatgatttattaagattatttgaatatggtgctttcccacctgaagcaaattaccttttcttaggtgattatgttgatagaggtaaacaatcattagaaacaatttgccttttattagcttataaaattaaatatcctgaaaattttttcattttaagaggtaatcatgaatgtgcttcaattaatagaatttatggattttatgatgaatgtaagagacgttataatattaaattatggaaaacttttacagattgttttaattgtttaccaattgctgcaattattgatgaaaaaatttttacaatgcatggaggtttatcaccagatttaaatacaatggaacaaattcgtagaattatgagaccaactgatatacctgatgttggacttttatgtgatttattatggtcagatcctgataaagatataatgggttggtcagaaaatgatagaggtgtatcatttacttttggacctgatgttgtatcaagatttttacaaaaacatgatatggatttaatttgtagagctcatcaagttgttgaagatggttatgaatttttcagtaaaaggcaattagttacaattttcagtgctccaaattattgtggtgaatttgataatgcaggtgcaatgatgagtgttgatgaaagtttattatgttcattccaaattttaaaacctgctgaaaagaaaaaatttcaatcaaattcacaatcaaatgttaaaaagagaggtaatagagtttactaattaataagtctttaaaatttattatacatattattatattatattatattagtctttttttcttctttataatttttttattaattaattttataattttaatccttatccacttatcctataatggaccaagataatcttccttaatactaccaattgcagaaattgaatcaacatcatgtcttgtaccaattattttaattcgtactttaccaccaacatgaacaacttgtccatcactatcaccaatataagcaggtggtgaatgagctggtgcatatctcatatcacttggaattaaatgccttgaaatgaaaattgataatggtccaacatctgcgaaaaatcccattgaattaacacttgaaacaattccatcaacaacttcacccttaaatggtctccaaactaatgcagtatatttaacatcaaattttgcattaccactattattcataactaatcctttacctgaatcaatttgactccaattaagtacacaaataacatatccaaatctacctgtacatgtaccttcaacatcatgtaataattgttgacgtaatcgtgcaggcatatcccctcccaaggcggaaggtggtaaagtaactgctaatgataactgtttcacaaagaacatccccactgtcctacaagcaaccccagtatcaacctctacatcgataaatcctatataatacttccttattaaatgataaagttgaaaaattcttattataataacccaaatcgtcgcgtcgctctttctcttttaaaattcccaattttcaaccttttttcaattttgcaactttttccaacatgaaatattaatataccacttttaagaccttccttttagcaaatgtcaaatcatataggatcagcaggacttgcattagtacgtacatggcatcatgtggatatagccgcagatcaacgtactttgggtagattggcaactcaaattgcattagtattgataggtaaacataaaccaattactcacccaactgaagatgcaggtgattatgtagttatttcaaatgctcaatatttaaaaattacaggtagaaaattaactgataaaacttattggtctcatacaactcgtcccggttcaggtatggcaactccaatgaataaaattattaatgattttggtcattctgaaattattaaaagagctgttagtagaatgttaccaaaggataagacatagaaagaatagacttgatagattgaaaattttcgatggttcaaatcacccttataaacaaaatataattgcttgggctgatgaaagtgataaagttgcaaaggcaattgaagaaaataaaattagagaatcaaaaattaatgaatttaataatttattaaattcaaaagtcttatagtaaatgtttcttcttttataacttttttatataatataatacatgtaaatacactcttcattacccccccttctctaacgaacagtataactactcttctcagtatacaatcttggtgtaatattcattgccattaattcttgaaataataatttagctgcatatggaatatgaatttgataaatattagtcttattcttacaactcttacattcaaattgtcccttctttaaatttgcaataacactcattaatccacaaattccacaaacatgaactctaaatgcatcagaactatccattaatctctcctttaaaaatccagctgcaccatgtgcaatcatacaatctctctccatttcaccaaatcttaaaccaccatctcttgctctaccttccataggttgtctagttaaattttgatatggtcctctagctcttgcatgaattttatcatcaaccatatgtcttaatctttgataatatgttggtccaaagaaaacttgtgccattaattttttacctgtatgtccattatacataacttcaaatccacgactttgatatccattctctcttaataatttagaaactgcatcaactgttaaatctgtaaatggtgttgcatcaccttcataacctcttaatgatgcaactttacttaataaacattcaattaaatgtgcaactgtcatacgtgatggaattgcatgtggattaataattaaatcaggtataataccttcactagtaaatggcatatcctcatttctatatgtaataccaattgtacccttttgtccatgtcttgatgcaaatttatcaccaatttgtggaattttcgttgttctcattctaactttaacaaatcttaaaccttcactattagttgttaataaaacttgatcaacaataccactctctgtaactcttaatggtgttgatgcatctctctttcgtatgatatttagttctttgacctaattcctctgtatctaatggaattggaacagttttaccaataataatatcatcacctgaaactctaataccaggtgaaattaatccatcatcatctaatttttcatatgtacctgctttaaatcctaatgtattacttctcattggtttttcaaattcttcaacaactgaaataccatttcttctctcttgatccatataacttctaaaaaataatgatctaaataaacctctatcaattgatgattgattcataatcattgaatcttcttgattataacctgaataacatgcaattgcaacaattgcattttgaccagcaggtaattctcgaaattttaaaaattccattgattgtgttttagctaatggcttttgtggataatataaaatatttgccattgtatccattctaacattataatttgttaagaaaactcccatagcttgtttacccatggcagattgatatgtatttctaggtgattgattatgatcagggaatggaataattgatgctgcaacacctaaaatcattgatggatgaatttcacaatgtgtaaaagaatgtgaattaatatgatttttaactctttgtgcaaaattattatcatttaattcattatcatcatcttccattttaatatcacttgtattattatctaaatcttcacttgacattgcaattaaaacagtttcttcttcctctgcatctaaatattcaacaataccttcacttaataatgaatcccatccataaattctactaacagtattcattattaaattaccttcttcatcatattgttcattatttccatcttcatcatcatctccaccaaaattatcttgtggtatctcttcaatttctctatctaatatttttctacaatgttcctttgttaattttaatccacctttaaattgtgaatcaatatcatcttcaacaataaataatggtctataaactctacctgcatcagtgaaaattttaaattcacgttccctaatatttctaattaatgaaacttcacttgatattgtaccacttcttcttaattgtttcattgtatcaactaacataccaggatctctatgagtaccaacccaattaccattaaggaaaacttttgtacttaatttatgttcttgaggatcataatcagtaattggttctaaaccccattcctctaataaataagtaattggttcacttgcagtaccaacagatatacatgacattaatgataaatttttaactaaaccacaagcttgaccttcaggagtttcagcaggacaaactaaaccccaatgagtattatgtaattgtcttggtttagctaatttaccatctctaccaattggtgtattagttcttcttaaatgtgataaagttgaagaataagtatatctatttaaaacttgtgaaacaccagcttttgaactcattgcctttttctgttcaccccaattaccagttgctaaagaatattttaaacctgaagtaattgttgttgatttaacagctgaaacaatattaaaatcttcaccatgttcaatacatctttgcatatatcttgtaatatcacgtgaaagtttcctaaataaagttctaaataaattagctaataaaggacctgctaaatctaatcttttcttaccaaaatgatctctatcatcttgttcctttctctctaatgcacataataataatctattaataatataacctaaaaagtaagctttatcagtttcatgaccaccatcttgtgaaatatgaggtaaaaattctctttgtaaatatatcttttgcaaattgaattcttctctctcttttaataccaactgcattacctcttctaccaatataatctaatgcaacttcttgtgattgaattaagaaaccttcttcaatacaaggttttaacatttctaacatttgccaatcattatcatcataacaaatatgttgtaaaatatcaccatcttcaataacacctaaagctctgaaaacaattataattggtatatcagttttaatataaggtaaagtaattttaattgatctaccaacaccaccagctttaaaacttgatgcaccaccacttgataatttaacttgaattgaagaaattaatcttgaacctttctctaatgcagatctaatttctgcaacatgagatattggtgaaacaccagattttttgaaaacttgaacaatattagcagatgatctctcttgagcaattaaaactttttcacttccattaataataaaataaccacccatatcaaatggacattctctaatttgatataattcttcttcacttaaaccataaagtgtacaaaatttagatttaagcataattggaactttaccaatgaaaattgtttgagtttcagcacctgatttatgaattttaatattatgtttttcatcaattatatcatcatcatcatcagtaaaatcatttggaattggtattaattcatcaatttgattagttttatatttataaatatcaccttctttataccaaataatttgatttgaagatttttgttgattattttcatcatcaatactttctttaaccatttttttcatttcaacataaagtggtgcagcataagttaaatttcttaatcttgcctcttgaggtaataaagttgaagttgtaccatcagcttcagtttgtgaaggttttgaaaggaaaatatcaccaaatgtaatttcataccttctattaacatcatcattttcagttatatgttgagcaggttgatctaaaattaattttttatcctctaaaactaattgttgaattgaagtttcaataaattcttcaaatgaatctaattgttgactaactaaacctcttgtttcaaaaaatgaagtaataactgtccaacaatcttcagttgtaatttgattatcattagctagagaatattctccatgatcatcatgattcatatccattcttgatacagttgattgaatgtccaaatgaagaaaccaccatagagccttctcttctaatgctcagcaaatttcactttttgccactttaattgaaaacaagaaaaaaattccaacaaagttaccctctccgattacgtaacaactttttctcttcccttttaaataatttttccaatcgtccatttcactacatgaatattaaggtaagagatatacagtgtagaataggataggacaggataggacatattcacaggacaaaccatgcttaatattatatcaccattgaggacggttaagaattcttttaacctgatatcccatcgtacaattataatgggatatcgtaaaccattttctccaaaaccaaaagtaaaggaaaatcgtcaagatcgtgcaactagatccaagagaattattcaattaattagagaatcattggagaatgatgaaccaaattttattccaggtaaaaaaccaatttatttaccatttgcaacaattaaattattaagaccaaatgcaaaacatacaccttatcaagcaaaatttattgtaccaaaatcttttaataaattagatttaagagattatctttatcatatttatggtttaagaacattaaatattacatctgctcttatgcctggaaaatttattagaagtatgcctgctccttatggttcaagatatagagataaacaaattaaaaaaatgacagttgatttaattgatccatttgtttggcctgctgaaaatgaaatgtataaacaagaaagggaattaacaagagaattaaataattatagagaagagaaaggcaaatgcaattaattctgatagagaaaagccaagtaaagcatttggtggtattattgataaaaatccaagaccaatgaatttcgtttcaaaaattgttagaagacaaatgaaaaatttaaaatcaaaggatattgaacttcaaaagaaattagaaactgataaattcattacttcttatattaatttataatatagtatgtatgtaaatttttataatttgaaactcatgtaaataataaataaaagaactcaaggtatatcaaagaagcaaatgaatagaatataatcaccataaccacatcacatcatcaatcctttgatgatgatgatctactaaaccaactacttttacgattaacaacattttgtgcagtatttgaagcacctgatgcaactcttttaacactttctaataatccactattatccacctcatgtaatgtactattattactttcactcctcgtctttttaatcttactattaagatcactattactatcattcagatcacctttactaacaatatcaaaatcatcaaaacttctagttggtgatgtattattcgtactatttgtatttgtatttatatttggatttacatttgtatttacatttgtatgtgttaatatttcaaattcagtttcaaatattgtatatccaaatggtgcaaataatgcagatattaatgatttattcgtagtagtggtaggatttggtaattccctattattcatactaacatctttcattgaataaaccaacccccataattgtgatacattattcattgtatgtgaaattccatcattattatcattttcattattttgtacaaacccttgaaataattttttataatatttcatatcaattcctaaacttaacaaaatttgattactaacaggtattttatcaattaaattacaaattatcaaacccataatacctaaatcatttaataatttcaatttaaaattatttaatttttccatattattatcaaaataataatgataaataattgaagcaccagttgatttactaatattcccattatatttatttttaacgggtataattgcaacacctaaccaaaattgtatataaattattaaaaatgatgaaaatggtaaaatattaattaaaaatgatattggtggtaattgaattatataaaaccatattgataataatatccaatatgacattaattcttgaatttccattgaaattgatttattaattgaaattgtattagttaatgatgcaattggtgtatcatgtaaattttttaaatttgttaataattttatagtattaataaatggccataataatgacacagttgaagcaattgatgtaattataccaaacatggtgtactaaataaaagaagaaagaaagaaagaacaatagataagaaaatataaaatactatacatcatactacatcatgtaatcaactaaatcatttaataaaatttctgtctctgaaggacttgcaacccaagcagttgcagcagctgttctacttgcataatcattattacctaaacttgcaaattgatcaccaacatgtaatgtattagattcattaataactatttcacctacttctttattaacaaaattttgtaaaatacgtactccaagtgatttatcaccaatatcaatccaaacatctctaccaccattaaatgcacaccaattgatattactatcttgaaatttctccctaagggatttatcaattcttaaaacaatttcttcaagtatttcacgttcaagtttaattccattccattggtataataccaactgcacgttctttaacaataattaaaatcttatcattaatatttaataattctgtaaattcttttaataattcataaccaaatgaaagtatcctttcaattctctttatcatcccataatttcatttcatctaataaccaatcttttgaactttccatttgtaatccactaatttcattattatatcttaataaataattagattcaccaccaataactaataaattttccttctgtttcaaagtacaattcttcactctccttaataccatcaattaatccaaataatctctcataatacttattagattgattatacccagcagcggttacaattccaattacaactcccatctttaataattctaataaatattttaaaattggtgaattcccttctaaattattaccatcttcatataatgtaatatcaccatcaaatgtaattaattttaaattatcctttaatgcaattaattgtgcagtattcagtatttgtctaatatcattaaaacttggtgcaacaaatttacgtttacttatacatcttctattatcttgaattttgaatgcatccactaatggtaaaactgtaaagaatttaccaatacttggtactaatttacttaatttacttaattgtggattattaatatgatcaattattaacatttcaatatcttgcagaatttcacaatatctattaactgtattattattattattattattattattaattgattcaattgtattaagtacaaatggtgttgaaactaatgctttaatccatgtaataaattcatcccttctatgttccttcaaatgataatcaactctatatcttgatgacattgttgtatataccccctatactcttatatacctaatagtaataaacctatacaaatggaaaacctcacgcgtaataattacaatggacacgatcttaaactactacttcttcttcttcttcttctttaccaactccaactacaatgatatcaataagagtagatgctaccatgctttcacagaatgtttctaaaactattagaattataggacaattaaaatctattaatgaaaatgataattcaggtattttagatagtaatggtacagttaatttccaaattgataataattttaatgaattattaattaataattattatgaatttattgcaattgttaaacctgatttaagtattaaagtattacaaacttttaattttggtgataatttaaatattaatgcagttaataaaatggttgaagtagttcataaaatacctgaattatattacgaataagtaagtaagtaagtaagtgtgtaagtaagtatttgatataatatataaagctataaatgatataatggtataagtaataaatttagaagaccttaatcaatccatcttcttttctttaattttctctttgaatctgctaaatttttatcaattgttgcactaactaatcttttacttgcaggataccaactaacttcacttggaaatggtgcaggagttgcaaaattaactaatgaactcattgtatatgaccaaccaggtgtaattgttgataaaacatttggttctgataaaaatgttgaataatatgtaacacttgaagttggaaatcttcttgaccatgaactaacagttatttgagaatttggttgcatttgcattggtgcataccttgttttacctgtttgttcagtataaggaattgaaaatgatgctgaagtatcttgtgctgcttcatcattagtttcaccataaggtgaagcacctgaacctgttgcttccattgtacctgtcataccactaagtaaaactctttcagtatatctaaccatatcaccaccacttttctaataatgtataaacttgaacataatataaaccatcagctcctaaatctgcatcgaaaattggtgtataagcattaatttttaaatcacttgcaggaattgtttgcaattttttgtaatccataaattgcatcatttgcacctgtacaaaggacaaatgtataagatttaatattatcatcagttggtgtttgaccatcatcttgccaagaaattggaattgcaatttgtccatcaacagcttcaaatgttgcacctgctaaaggtcttgtaagtactaattgtgataatactgggttaattatcagtgcaaagaataatgtaacgagtgatagaggtgataacattgtgcagtggatgaagaagtagtaagagaaaagaaaagaaaaagaaatcatgaataataataaaagaaataatgaaattctgttttgctaaaaataaacaaaatcctcaaaaggtccttctctttctataagctacttcttattctgtaaagatgaaccgtataactactataacatctcttaaacaaacactatacccaacattacacctcaatcccaccacaggatttattctttcaagtatccaatctcttagcttcattacaagtaatttacaccttaataacaataatgcatatttcattatcaaatggtaatgataatagtagatacatgaaaatttggcaaatgggttcatttcaattatcattacgtagagtaagttataaaaatattgtagatattgtagttaatcctgacaatttacctagatggtcatgtgataattataaaaggatattatcattcatggagaggtttgataatgatgataaacttgtattattatcatattcagaggatatttcaccaaatgtaagacttgtagaggaaatagagagaaatataaattcatttattaaaattgctattaaatcatttaattatctatttaatacagataataaagatactataccaaaattaaaacaatttaattgtaaaccatttattaaatggaataaaagtaatcatcaaaatatattaaaatatttcattaaatactctagtttcctttcagaagatgatctaatattacttaatgatccatttatttggaataagataggcattactgaaacaattagattatcaacaattgataccctaagtgtaattcttacaggttatacatttgaaaatggtatgatattacaatcaactaaaaatcgtttaaatttatataatccaaataatgtatgtaaataattaactagattttaattcattaataaattcaccaactttatcacctttacgcattaatgattcaccaataagaaatccgaaaacattttcatttttataagatttaatatcctcagttgatgtaataccacttaatgcaagtataacaatatctttattattactaccaatttcattgataattttacttgttgttgataaatcaacattaaaattagttaaatttctattattaacaccaataattttagaaccaattttaattgcaatatttaattcatcaatattattaacttcaattaatggttccatttgtaaactacgtgaatattccaaaagttcctctaattcattaattttaagcattttaacaataagtaaaatactatcagcaccatttaatcttgattctaatacttgatatttattaaaaataaattctttacgtaaaatacatggtctattaacaccctcctactgaccatttcttgcaatttttaaatcattaattgaacctttaaaccaattaggttcagtgaggatagaaattcctgcaacaccagaattagcatatcttaatgcttgaactgctgcattagcattaatatcaatattaccctttgatggtgaagctcttttaatttcactaattatagcaatttccttattagatgttaaattaattaatttttcatgaaaattaacaactggaggataaagacctaatttataatattccttctaaatcatcaaatgataaacctggggaggacatagtagtttcaacatctttacgacgttgactgtagattttttctaaaatattaggagtggaagtagtactaacagtactaatctgaagtggcattatcatttttccaataaccaccttcaattgataaaatatttctaatcattaaatgaccttcttcagttaatatactctcaggatggaattgaacaccttcaattgtataaattttatgtctaacacccataattatattattttcagttttagcagtaatttctaaatcatttggtaatgtccctaatgaaccagctaatgaatgatatcttgtaattgcaacaccttgatggaacatttttaaacatacctttattatcatgattaataattgaagttttaccatgaacaatttcaccagcaaattcaacattaccaccgaaaacttcaaaaatacattgttgacccatacaaactccgaaaattggtaatttacccttaaaataagaaataacatcacgagaaatacctgaatcagtctttggatgaccagggaccaggtgatataactataatatcaggatttaatgattcaatttcctcaattgtaatttgatcatttctaaagacacttactttagcaccttcttgacaaagatactcgtatagattccaagtaaaggaatcatagttatctatcataagcacatgtttagaagtcattgccagaagaagaagtgtgtatactagacattatgactcttattaatcaatagtgaaaattcatgataataggttaaaattacccggattatgtcattatagaatatcttttccaaatttttcattcttttcactaaggttaaagacctattacattatcttcctctcttaggacaaaaaatgatctatttaaagaccttacttaaagttatagacaattcaggagcagagatagttgaatgtatcaaagtacttaggaaatcaccaatgaattgtgcacatgtgggggataaaatagttgttgttgttcaagaagctaaaccattatcatcaacaattacaggtacaagtgcaagtaatagagttaaaaggggtgatatttgtagagctgtagtagttagaactaaatatccaattcaaagagatgatggtacagttattagatttgatgataatgcatgtgttttaattaatcaaaaggatgaaccaattggaacaagggttggatcagttgttgctagagaattaagaaagaaaaattttaataaaattatatcacttgcaccaagagttgtataatgtctaatagatagatagatgtatccatgtaaggtgtatatcaactgtatatagtaatgtctcttagtaaaagcaccgacgcatcgtccagtaagtcctccctactatttttaatttcctcactgttgaaattattcagtaaatttttcattgaagtattactactacactagacactcttcttaggacaagacaatgccatatcagaaaatacctaaagcattacgtccatttatacctcaagggactctcctcttctcgttatttgaaacaaggtcaacatttagatttaatctctaattacacaaactcatcatatcatttcaataatgtcagtaaattggaaattatatttaaacaacattcatcttatggtcatttaggtatgaagaaattttggaaaaataatttgaaaactatttattatcataatccatcattaataatcgatgttaaaagaatcgattgtcaagagaaggaacaacaattaaattgtccatgtattattaaaacaattacaaaagaaggtaaagagattatcatcaatggtaaggataaacatagtgatgatataatgaaagagttggtggaaaagacagcagcagttgcagtgccaagtgaagatatcatcagttattcatcactgattgaagaaaggagatagtatagtatgtagacttgtatatattacgtaatataaaataatttaaatatacgatcgtataattcattgcatgattttaccactgggtgaaaaattattatttactgattacatctacagctctttaaataccgtgtcgtattcttctttcatttggtacacttctttcctctcttctcttcctttattagagcaaatgtctgtaattaaatctcttatagatgatactgttagtatctcccattacctctattcacatttcatctctttatcactcctatctcaattatcaatcctattctcatttccattcatttattcattattatggcaatttatttattctttaagaaaagatagagttccaatggttcattattacatcccatgggtaggttctgctgtcacttatggtatgcaaccttatgattttttcgaaaattgtcgttctaaatatggtgatgttttctcattcctccttttaggtaaagtaatgactgtttatttaggtccaaaaggtcatgaatttgttttaaatgctaaattaagtgatgtttcagctgaagaagcttatactcatttaactactcctgttttcggtaaaggtgttatctatgattgtccaaattggaaattaatggaacaaaaaaaattcgcaaaagttgctttaacaaaggaaagttttattaaatatgttcctctaattaaagatgaaatgttaaaatattttaaatctacatttaaaggtaatagtggtgaaattgatgttttaactgctcaaagtgaaatgactctcttcactgcttctcgttctcttttcggtgatgaattaagatctaaattagatacctcatatgctcaaatgtattctgatttagataaaggtttcactcctcttaattttgtcttttcatacttaccattacctaattattttaaaagagatgcagctcataataaaatcgctcatacttacctagatttaattacaaagagaagacaatcaggtaaaattgaagataaagatttagttgatgcattattgaaaaattctaaatataaagatggtactagaatgactgatagagaaattgctaatttaatgattggtgttttaatgggtggtcaacatacttcatctgctacttcttcttggtttttattacatttaggtgaaaaacctgaattacaagaagaattatataatgaaattaaatcagtactcggtgatagaaatgatttaacttatgatgatttacaaaaattagatttagttaattcaacaattaaagaaactttaagattacatatgccattacattcaatttttagaaaagttatgaataatttacctgttccaaatactccttacattgttccaaagggtcattacgttttaattgctccaggttatactatgcttagtgaacaatatttcccaaatgctaatgaatatcaacctcatagatgggataatattaaatcaattgatggtggtatttcattaccttcaattgaatcaaatggtaaatcatcaaatgaaactattgattatggttttggtaaaatttcaaaaggtgtctcttctccttatttaccattcggtggtggtagacatagatgtatcggtgaacctttcgcttatactcaattaggtactttattagttacctatatccttaattttaaatggtcaagtaaatgtcctcccgttgattatacttcaatggttacattacctgaacaacctgcaactattaaatgggaaagaagagaaaaaatctagatgttctttactataattatacgaagttatataactatctatactatcttattattaatactacttttcatgatgtttttctatcattaacaacacttaactctttctccacttttaaatctctattcttaacttcttcatctattaaaacttgtttgatttgctttgtccatttatcaacaattttactcgcaattgtacaacattctaaaattttaccctgttcaatatttaatcctccacttttactaatttgacaaacttccttgttagaatttaatgtaattgtcatactaccctgtgataataattcttcctcagatgttgcatcaactataattatctcattagaacttctactctcagattctatttccccctcctcatcattatcattatcaacttccattctatcattaacatcatcttcatcatcactatccttccttaatcttcctactaataacccctttttcacctttaatatttctttcaatactctctgttgaaaaaaattgaaatgtaacacttaatggtatatgtaaaacacttaaaccaactttctccctttgattttcatcaaatataattaattcactaccttctccattaccaataatttcaatatcattcttcttaaaatttaataatgcaataataacagctaaattacctgcatcaattaaattaccatcataattcaaaaatttaatatcagctctaattgaccaacatttttgtccctgcaattatacataatgattctaaatctaatgcatttgaccttctaactgccttttcaattaatctacttaacattatttcaatacttgtttgatcaacacctaatcccatcattgcaccacctcccataataacatctgtcccattatcttcactaccttcttcaactgatataacagttttaggtataatagctggtgcacttgttgaaaaatcattaccaccaccatttgaaaataatggtgaacacattggagtaatttcagtatttatattgaaaataccttcaaattgtctatcttcgaaaggttttgtaattatagcagatattttacaactaacatatgtttcacctaatttaatttcaatattaccattatctttattaattattgaaattttcaaatctcttggttcagttaatggacgaagtgatggtcttaatggtggatttgatgaaaataatgaatgaagggttaaaatgttaggtattggtaatgtattgtccgtacttggcatggttgatgtttaaaaagaaatacagactgaaaagattaaattttcatgttgaaatttttttttacctgtacatgatttttaatgatcattactttatattaagaacaatacctttttttttaacttttttatacaattatacaactataaaccattacttaccatgcaattttagcaaagaatcccttatgatatcttctaaccatcattttacgaatttcatcatatgagaaaacaattataccaaaacctaatgaaataaaataatattcaactggaacttgattattacccaatgctttttgaattgcaggaacataattaagtaagaaagtaacacctaaattaaatggaattgcaatataaataaatctattatcctttaagtaaattcaattgaaagaaacttaaatatcttgtacgcatacacattaaattgaagaaattcattataaccaaattaacaaaataaattgatgaactcatattaattatatcattaacaccatctaattcattatatttaccataacttaaattaaaatctgaaaaattaaatccatgacgttgtaaattaataaatgccaaaaggaaacttgtaaatgtgaaaaatgtaccaattgttaaatatgaatgtaaaaataatttccaatcaactaatttttcaccactaatacatcttggttttttcttcaaaagattcttttcacttggttcatatgcaagaaaaataacaccaatacaatcagtaatacaacaaattataatcatattaaaacttgaaagcatttgtgggaaacctgctaatatatttaataaaactggccataattctgcaaatgtaccagcaggtaataaataaccaactgtctttccttaaattatcgaaaactaatctaccatactttcaatgcttcaataattgaattaaataatgcatcctctgaatcttcatcatcattcattaaaattaaatcagatgcctcttttgcaatatctgatgcatcaattaatgaaataccaacatctgcttgctttaatgatggtgaatcatttataccatcacctgtcataccaataattgaaccatatttttgaaattgtttaataattaataatttatgttcaggtgttgttcttgtacaaactaattcagaatatctaataacatttttccattccatttcagttaataaatcaatttcattacctgttaaacttaatgcacgattaataactgttaccttatcatttttacctttgccaattttcaaatattcaatttcatcattttcatcaatactataattatcttcattttcaacataatttaataaatcattatatttatcaattggttttgtaactatatgaacttgttttgcaatttctaaacctgttaattcaaaatctcctgtaatcattgcaactttaatacctgcacctcttaattgatcaataacattttcaattttctttcttggtggatcttgaataccaattaatccaattaaacataattgattattattaatttcatttttaattaaatcttttgtatctgcaccttgattttcaaaattttgacaattattaataatttgtgatgctaaaagtataactctcttaccttgtcttgaccattcatccttaattgattcaattttatttctaatttcattattaattaaaactgtcttatcattattatcaattgaatatttacatttatttaataaaatatcaggagcacctttaacaactaataaaccagaatcatcatttacattatcaacaccaattgattggaaaccattatttaaaggttctaataatttagccatgtatttatcatttgaattaaatgccatttcgaaaattgttttccaattattttcaaaaaatgatttatttgcaaatttatttgaaaaattgaaaattgctttatcagttgcattaccagttaaaacaccattatcagaaatcattgaatcattacataaacttgaaatagttaataaatgcattgttgaaggattattattattattattaatatcaatctcatcataattaatttcattaaaaccttttgaaatatttgtaactgacatattattttttgtaattgtaccagttttatcaaaacataaaacactaattgatcctaatgattcaacagttgataaacttttacataaaattttattctttttcatttgatttgcagtaatcattaaacaagttgttaaagcaattggtaaaccttcaggtataaatgcaacagcaacagaaacaacatcaataattaaagtagcaacagaaatccattcaggatatgatttcctaatccaaactgcccaaagaattataactaaaataactaaaattaaaatgaaaattgtaataattgcaacaaatcttaaaatatccttttgaattggtgttaaacctgaatttggctttgaagttaattttgcaattgaaccgaaaactgtattatcaccagttgcaattacaatacctttacctgaacctgaaacaatgaaagtaccttgtaaaccaattctattactttctaaaaaatttgaatcttttgaatcattctttgaagatgctaataatggaactgcttcacctgttaaaattgctctatcaattgctaaatcacttgaacattggaaaattctaacatctgcaggtaatttattacctgcaattaaatttataatatcacctggaactaaatcttttgcattaacaattttcaattgaccatctctaataattgaaacttcagttggaattaaattattaattgatttcataacatttgaagatgaataatcttgaatcatattaaataatgcttgcaataagaaaactaataataaaataatacctaaagctaaatttgcaactgcaggatttggttcacctaagtggtttccaacaaatacaacataaaataccagcaactaataataaaccaccaaaaccaccaaagaaatacatgaaaattttcttaaataagttccttggaggtggtgattgaacattttcaccaaatttcttaaaattaatttgataattaacatcatttaaacctgaatttaaatttgaattaaatttatcagcaatccaatttggatcttcacaatgataagatacattagcaaatttaacctttggatcagataaattagtttttttataattatcaatttcatgagatgcagttttaaataatgaaggtaatgcaacggatggatcaacttttttagtagcagcagtaggagttggtagtgtatgttcaatatttggtaatttaaaattaatatgttgattatgtggataatcaataaatgaagtttgaacttctttactagttttcaccaacagggagggaattaagggtaactatcgtcaatatctttattatcaaatgacatgtttgttatatgaagagatgaaagagagtgattagtatatactgaatttacagcataattgttgatatttaaatgaaattatcccaaagagagttacaagatgtagttaaaatgtaattaagaagtgaatacaaacatactgtgccatggtacaaggtactagatcaagatcctgaagtcacaagtgctcaatactcgtgtacatggtgctacgaggagaaacaaatggtagcaaaagtgaagaaaagtggtagtaatatacaatgaggtaataaaaaataaaaatttaatttttcatgtacatggtagcacttctcttgtgctttattaacagtcttacattacttatgtattctattgatgatgttatgatgatgtattggatattatacatattactatactacacactactctttctttctaaagaacatatctaaggcacccgatttaaccttaacaacgggtttactcgctttaactttacccttaacacttactttactcttcttggttctttgttcattcattgaattctcatgcatttgttcaagtgtctctgtaaatgtatcctgtgcctgttgttgtagtttaagatcattggtaaatgtcctcaagtttactgaaattgtatctcccacttatctgatcaatataccatttatctacaaatgcactcataattgacacagcttgctttttccatatctcttcttttatatcattaggtatctctctattatacattgtatcaattcttaaatgtaatgatttataaacatctcctaccattcatcaatttatctcccaacatgtcaactttattacacaaaaattcaatagatttattaattgatggtttaaaatactcttcttcatcaatgttggtcatttcacttattaactttcaaatatttactaaatttcatattatattcattgaaccaatatatttataaatgattcaatatcacaaattgaatcaattaaatcttcataacttattaatcgtttactatcattatcattagatttaataaattgattcttaaaatatcctaataacagataaactggtgaaaataatgtcattataaataattcattatttgatccaataattaatgcttcatcaatattttcatctccatttttaataaatatacaattatatggtttaccatcaggtgtagtctgtaaattctttatattataattcttccaattaactttatccaaaaggtataattctactatttcttcatttccatttccactatcattcttagcaactataaattcttcaaagttgtttgaaataggatgcaaacctttaattatactgtatttccacccattgctattcaaatgatccttctggcactagaatacatctgtaatctctacaatccttctctataaactgtgattccatagtgtattataagaaagaccatatagaaactgactttaataaaattggaaaaaattcatttctcacagtaaaccaaagggcatattaaatccgtgtttataatatgttattactggttctttatctaggaatatagtatagtatagtatacatagggtaaagtactaatggcaggagataatataggtaatggagatgttaacccaacggctaattatacattacctgggatcatgcaatatttacaatcacaatttactcaagttgaaagaaatagattacaaagtgaattagagaggagttcattaaaattgaaaataattgaattagagaatgaaaggaatgctttaatacgtaaaaatgaaaaacttcaattaattgttgatcaattaactgctggtagtagtttgaaaaagaatgatgatgatgataataaggaaaatataaatgttaatatggatcaattttataatattgataatgatcaatttaatgtaaagaaattaattcaagcaaagaaattcttaacttctgcaacaaatgaaatcttatatcttttgaaaactccaacaattgaattagattcaagtcaaagtttagctgttaaaaatttcattaatagagataataatgattcagtatttttcaattataacaataacagcaacaataacatcaatagtcctaatgatcctaccaatagtcccaacaataatggatttattaacgactcaaataataataatcataatgatgatactatcatcaataataatatcaataatgaacttgctggtcctgatattgaaagacagttaaatgatattatttcaagtcaaaatattaatagtaatgtaccagaaagtgatgctgaaactattattgatgaacatgaagaaattataggtcctgtgaaatcaaagaaagatgaagaagctgatgatgaagaggaggatgacgaagatgatgatgatgatgattttgacgatgatgattttgatgacgatgatgatgacgatgatgatgatgatgatgacgatgacgaagaatttgatcaggatcttaatgttaacaacaaacaaaatcatcaaatcacaaattcagattatatccaaacatggtcaaaatgaaaaggaaaaattattaaaattattaaagaaatcaccaaggaaacccgttattcctcaacttccaaaattatcaattaaacttacatctgatgtatcagaaatggaaattaaaaagggtaaactatttgcatattatgataaattaaatgttgttaaaatttatgatgatttacttaataaaggtgaattaattaaagaaattgaactgccaaatgcaattgatattgttgatatagttacaaatgaaaattatgttttaattggtacttcaaatagtttaatagtttataatattcaattaaatgaaaataatggtaatggtaaaattgaaataaataatattaaaccaaagagtatagatttagatcaaaatagaattattatagttacagaaaataatattattatttatgaaattgaaacatctaccaataaaattaaacaattaattgaatgtacaacacattatgaaggtgtaattaaaaaaattaaatttattaaaaataatgaaaattttagtattgcattattatcatcaactgcattatatttatttgaattaaatgatgatggaatgacaattaaaccttttaaaaatatagtattagaaaattataatgaatggttacttacatcgaaaaatttaatattaaatttcccaaataaattattatcattatatgattttaaggaatgttcaggttttaaacaaataccatttaattctaattttacactggaatcaataggtgcatgtgttgatgaagatgatattttttatgtttccaagtgtagtgataatagtcaagataaagataataaaagtatagataaacaaaaatgtgaaatattattatttaaagttgatgaatttgatggtattaaggaaatttccagtattacagatattactttcagtgatcgttattgtgttggtaagatcaacaatggatttgcatttttcgtcattaagatgggaatattgaagttcatactatataatataatataatataatataaaatagtgtataaattgcttaaaaaaagttttgatatagtaggtattttttatatttttgctccccttttcacaatattgtaatttgattgttattctttatggataccaacacaatatgttagtaggagactatgtatttaagagattacttatatttttaatattaatgttctttgcattaatgttattatatacagattatttacaagaacttaatttttatcaaaataaactacaattagatgaatttaatgtaaattttaatacttttaaattacttcaagaatctagtctattaaatcaacaaaaattaaaattagatacaatatctaaatctaatcatattaacatcaaatcaattgtaaatataaaggaaaatgtaagtaataaagataaagaaattgaaaatgttgaaattttaacacttaatcccccatttcctgatattgatttaacaacaattggacctgtattcattgaaaatggattaattcatctttattgtgaatatagttttgattgtattagatgtacgattggtggtaaaatattacctgaaaagatttattttaaaacaacttattttacaaatccaaattttgaaaatattttaattaattttggatttaaagaattaattgaattttttaaaattaaggaaaagaatagtaataatgaaactgatactaaaagtttagaatgggttggagttcaaaatttaaaacctaatatcgataatatcgaattatttacaaattatataatgcttttcggagcaaatggtactaatatggatgttttcctaaaacaaaagattcaaaaaatgatgataataatgataatgatgataataaagaaatttcaaatgaaaatctagttattaatcaatataaatattataattttataagaacacaagtatgtgtattatttgttttaatttatcttaaattaacaaattttacattatttggtattacattaatatttcaattttcaatgcatattccaatttatggatttagtatgtttaaatttgaacctaataataaaaatatcaaagatgatgaggaagaacaacaagttgatgatgatgatgatggtgataataataataaggaaaatataatcaattggaataatgaaacatcagtatcacagagcagttcgttaagattacgcaaaggatgtattaaagagattaaaagttccgttagtaaggaagataatgtatcacccttatctaacagtaacacgatgacagtcaattcactcatttcaccaataaaagatcatgatttagagactggaaatgggaatggaagtgaaccacttcagaaaacaaacagtacattaataaacaaggaaagtggtatcagtataggaatgagtacaaatgcaagtgttagtactagttcaaatagcagcaaaattataattcaaacatcattagatgaatcagttgataaatattgtttattctatttactgatttgtttattctttctatttcatttaattgtttatgaaattataaatataatactctatagccttatctgtggagtatttgaaaaaattgggaaaagtaatatggaacattttgaaattaagaattcatcaaataaatttaaatttcccaacatttcaataaataatagtaatataataatgggaaatatacaattaacagaagtatattgtttgaaataatacttaatatctttggatggttgtttaatgtctcattagcagtgatatttcatagtgtttacacattttgtatctacagatacacagtttctgtctactgaaatgaaatgaaaaaaaaaaatgtcggctcgtgagattttttcattattatcttctttgaatccattaacttctttttgccatcaagtgtataatcattgtataggagtataaccattcatccaaatgcaagtaacagagagagagatacagagggaaaatattaataaattatttggtacaattaaaagaacaatacctaatagaccaggagttattaataaaatttgtccatgttttatatttgatgtatgtccgtatgaattattgaaaaatacaagggaatcaatgggtgaatgtcctaaattacatatacgtaaaccaccaaatgatgaattaagggaagaatgtaagaaagagttaaagaaattaatagattcatgtgatgaaagaatttattctaatcttattagaaatcaattgattaataataaagatagtgagattaaggatgaagatgatgaagatgatgaaatggaaatgatgataaaaggaggttttttgaataaagtactagataaatgtattgataatggtaataaaagagatattgaattaattgtaccatctaatgtcattatttgtgaaatttgtggagcttcaatgttaagaattgatacagatcgtagacttattgatcattttggtggtaaattacatagagcttatgcagatatgaggaatatgctaaaagagtagtcttcgacttacagatatcacgtgatcagaataatttgcaaaattcaaattttttcactttggtcgcacaaattaaatttttggggatttttcaatttcaataccgttgaattaattggttgtcagttaattacatgttcattagactttccttcattagacaacaggatggctgtaatgtttagtagacttgcattcaataattggaaatcaactattccttttaaaagtcataatgtcattaaagttaatacattacgtagtttttcaaataataaaattttaaaaacttatgaagaagaaaaaattgttattgatgaattatctgcaaaattaactgatgaagatactaatagattatcacgtatgagaaatattggtatttcagctcatattgattcaggtaaaacaacttttactgaaagagttttattttatacaggtagaattaaggcaattcatgatgttagaggtagagatggtgttggtgcaaagatggatcatatggatttagaaagagagaaaggtattacaattcaatctgctgcaacttattgttcatgggatagaacacctgaaaaatctttacattttaatttaattgatactcctggtcatattgattttacaattgaagttgaaagagctttaagagttttagatggtgcagttttagttgtttgtgcagttagtggtgttcaatcacaaactgttacagttgatagacaaatgaagagatataatgttccaagaattacatttattaataaaatggatagaatgggtgcaaatccttggaaggcaattgaacaaattagaactaaattaaaaattcctgcagctgcagttcaagttccaattggttcagaaaaagatttaattggttcagttgatattattaataaaaaatcaatttattatgaaggttcacaaggtgaaaaattaagaattgttaatgaaattccaaatgatttaattgatttagttgaagagaaaagatctgaattaattgaaactttagcagatgttgatgatgaaattgctgaatgttttattgatgaagttgaaccaacaattgaacaaattcaaggtgcaattagaagatcaacaattgcaagaaaatttactccagttttcatgggtacagcattagcaaataaaggtattcaacctgttttagatggtgtttgtgattatttacctgatccaagtgaaattttaaatactgcattagatttatcaaatgatgaaaaatcagttaatttaactgcatcatcaaattcacctgcagttgcattagcatttaaattagaagaaggtaaatatggtcaattaacttatttaagagtttatcaaggtaaattaaagaaaggttcaatgattacacatgttaaaactggtaaaaaaattaaattagctagattagttcgtatgcattcagaggaaatggaagatgttgatgaaattcatgcaggtgaaatttgtgcaacttttggtattgattgtgcatcaggtgatacatttactgatggttcagttaattattcaatgagttcaatgtttgtcccagatgcagttgtttcattatcaattttacctaaaactaaagatgcagcaaatttctccaagcaggttaatagatttcaaaaggaagatccaacttttagagttcattttgataaagattctaaggagacaattatttcaggtatgggtgaattacatttagaaatttatgttgaaagaatgaagagagaatataatgttgaatgtacagttggtagaccaagagttgcatatagagaaagtattttaaatggttcattatttgattatactcataagaaacaatctggtggtgcaggtcaatttgctaaagttatgggtaaaatggaagcaacaagtttaacaaatgcagaagaaattggattaacacctggtgatgatattaaattccgtaatcatttccaaactaaagttgttggtggtaaaattagtgaaaaattccttttagcatgtcaaaaaggttttgaagattgttgtgaaaaaggtccattaacgggttcaagagttttaggtgttcatatgattgttaatgatggtgcaacacatgttgttgattcatcagaaatggcatttagaactgcaacacaatttgcatttaaacaagcatttatgcaatcacaaccagttgttttagaaccaattatgaatgttgtaattactgcaccaaatgaatttcaaggtgcagttattggattagttaataaattaggtggtttaattaatgatacagaaaattcaagtgatgattttaatgttattagtgattgttcattaaatcaattatttggatttgcatcaaaattaagagctgttacacaaggtaagggagaatttacaatggaatttaaagaatatcaacctgctccacctcaattacaaaagcaattaattgaagattatgcaaagaagaataaaggtggtgaataagtaaaagaaaatctgtatatagtataataataatagtaaataattaattatataatttaacaagcacaattattataattatcatcatcaacattaatattaacagcatcagtataatcatcattaaattccattatttcttcttgctttaaagcacatcttgcaacaacttcaaaagcttgatcaatattaacactttcctttgcacttgtctcaaaataaggtaaattacctaaactattagataaagcttgtgcctttttagttgaaattaatcttttaccttcctctaaatcaattttattacctataataataaatgggaaattatcaggatctttaatatttgcttgaataaggaattcatcacgccaacttgttaaattttcaaaacttttcaaatttgtaacatcataaactaaaacacaacaatctgaacctctataaaatgcaacacctaaactttgaaatctttcttgacctgcagtatcccaaatttgcattgttatatttttatcatcaattatcatatcctttggtaaaaaatcagctccaattgttgccttatattgttgactaaatttaccattaataaattgttgcataagtgaagttttaccaactcctgtatctccaagtataattacttttaataatgttttcttttgtccagccatggttgttataaaagaaaataatagtggataatatagatgataaaaaagcgactgtataatatattaattaaacatgaattataattataaagattacataataatatgatataatgattgattacctaattaagtatattctttatacttggatgtctcttactggtagcagaagtatcatcactgatattatcactctttaatcctacaagtacatgagaagcagccttaatatcatcattaacagtaattggattttttttcttatattgtataacattattagaaactgcactaacagtattaggtattgtgtacgtataacttggagaagaattagataataatgaagatgaagatgaagatgaagataatgatttagctcttttaggtaattcaatatctatatgtttatcaataatagcaggtaatggtaatttaaaagaatttgaatcattttgtaattgtaatattgatttcctataatttgaattttcatttattttattcctaatattgctattgctattattatcattattattatcattatcatttaataaattttcaatttctaaattaattggatctaatttattattatcattaatattattaaataattccaaaagattaaaatcattatttaaatctctaaatttttgtaaatcaatatcaaaattacaaaaatcaagattattattttttaaaagccaatttttaacattatttctatttgatttttgttttaacatttgtaattttaataatttaataattaaatgtaaatatttaatatattcaacagttgattgaagtattgttaatttatgcattgaatcaattatatcagtattattattttcaatatttgataaaatatttaatctacaagcaggtattaaaaattttaaagcatcaaattctctattcattttaattctacgtcttttttcaataattgaatgttgagttttcaaatctttctttttacgttcaatttgatcatttgttgataatccattattaatagatgattttcttctttttttaggatttggtaattcatcaatatcattaggtaaaggtaaattagtaaatctagtcattggagatattgaaggtgaatgattatataaattatttttattatattcatcatttgaaataaatgaagaagttaagaaattagtatttgtattagtatttgtattattactatttgacactgaatcattatttgaaattataggtgaagaatttgaagatataaattttggtttaaagattggtggaggtggtaacattgtattattattgttagtattagtattattagtattattatacattgtatattgatctaataagaaagttaatttaaatagagatatgaaaagggggatataaataggttattatataaatataaatataaatatattataaacagaactaattaattaaagactcgtgtgcatagttgaataaagaaggatgtcaagtgtgatacttcatagaataagataagataataattataataataataataataataagtcccccatgtggtaatagataatatagagcacatgtctcttactgagtactaaatacaatagataagaataagaaatttagtactgagcctctttttaagagtcacgtgatattacgtaatgtattattattacgtaatgtattattattacgtaatgataatatatttgaaggctcatctaaatttaattttaattttaattttaatttaacccctttacagagggctcatctctttttaaacattttccactatttcaactataaataaagcactttccccccgttttattaatttatttactatcctttactatcacttctttcttttctagtattatattcttatcctatattaaccaatggtataatcatactgtataacaaaacttatataacaaactttttcattaataacttattttttttctcactggtgaaaaattaatttctttattacaatgactaatactatatatcattgataataatataataattttaccctaatttatcctttttttcaaatttaaatttttcattatcttatccttattaccttcttattttatcttattctgtatataactaaatcacacatttatttgcttaatatacactaatacacacacatacacataatgaacactttaaaatctcaaaatcaatctaaaaatattcaaaatattcaaaatatccccctaaatcatccacatgcttttctaccattactattgaataatacaaatacaaatacaaatacaaataataatacaaataataatacaaatataactaacatatcagaaaatatacttgtactcaaatctttactaatattaaatttagttttattagataaatttcatcaacgttcaaataattcattattattaattcatttacgtgatttaattgataaatctattgataataataataatacaaatgatttattatttgataaatttcttatatctgttgaatttaaaaaaattttaaatattttcaatgaaattttcaataatgcaaattattatggattaattgaattacattcaatttataataatttcattaaaaactaattaataacaattcatttgatataaatatagtaaatgattttataaataattccctatgttgttcaaattcaatgttaattttatcacattttaagtatatttatccaacaaatgatcaaattaaattcatttcacctagattcaattaaaactttctatacaaactctttcaataaatcatcaactaactacaatcaacacttcattactcaatgcaaataacttaaatatcgttaattctgaaaatttcttaaatttccatataaatagatggaaaaatttaaatttattagatactcatattttcaaaatttcaccttcaacatctacatcttctaagctctctctctctctctctctctctctctctctctctctacttcactccctttttatagattttaaaattaattaaataagtacatcatagtaaatgaatttggtagttaaactaccttcaaataaatcacttaaagtaataggatttgcagattctcataattggcaaataaataaagatttaacaacagaaacatctacttcaatattggaaataccgattaatgattcaactaaactactcaacgtgttaactgatcataatcatggatttggtctatacattacaatcaataataaatcctatgctatgatatccaataataataataacagtaacaacaacactctttggacattaaataaacttatcttcaaaacctatacttaaagaatttcatgaaaataataaatctcttaataacacaatcaattctactactacctacatcaagtaaagtaacagatccaatcaaatatttaacagaatcatatttgaaaatcttatattcatctaatatacctgttgatagttttattaaaatatcattgaaaaaacttaatcataatattaatgatactaaaattcaattatttaaagattgtctcttaaacttacttattaaatcaattgaaaatttcgattcacgtcataataataataattcattaaatatttggttaagtaataatttaaattatattgataaaattgaatcatattatagagataagagatttaataaattgaaaaataatttaaataatgaagatattataaattatttaaataattttaaattaaaggatttgaaattacaaataataatatgttttgaattattgaaattatttcaaaatgataataatattaataataataataattttattaaagatccaattccaacattaattacacgtaaaaatcattcaattaatttaattggtaggaaaaataaaaagaaaagacttataccaactttattagggacagttataccaacaaattttgaatttgatactgattttagacatattgataataataataataatgataataataacattgataaaaataaaattgaatcattaattaatttatattttgaaaaattatgtaattgggatgtaattatgggatttgattataaagatattaattcatcttgggggtttatatcaacatcactaataccatattatgaaaaatattttaaaaaattattaaataatttatcaattaaatcaagaggacctgtatatattttaaaattacgtgcaagagaggaaagattgaaaagagatgaaattaagagattaaaatcaataacaacaaaggaaaataaagaaactattaaatccaatacaattgatttatcaagtattaaattaactagatcacaatcatcatttagtaattcaaaacaatatcttgaacgtaaaacttttagtatgactaaatcaactccatcattatcattatcaagatcatcatcaacattatcaacatctgaacctattaaaaagaggaaactttatgcaccaagtaattcaaatttatttcatcataatcaaataattgaagcaactccacgtaaggaaaatcgacattcaatgattatttcagaaactcctaaattagatattaaaaaaggtgaattacaaataatttcatctccattgaaaaacacagtaaatcaaatgcaatcacaattgcaatcacaattggaaatttctgaaactcctgtattagatagaattcaaattaaaccaggatttttcgaaattaattcatcaccaatgaataaaaataattcaaatattataacttcttcaccacctaatattaattcaacaaaacgtaaattaaatttccaataataatactaataaattatatataatattacttttcctaattaaatacacttttatacactattcaccaaagaatataccatgatatattaaaattgcattattttcactacatatcctatcagcaattaatttaccaactctttcacttaatttttccttcatttcatcatttaaaattttccccctctttaacaagtaattcaccatctttcgttaattcatttaaacattcaattaattcatctaataaaattcctctattttcatcatcttcattaaaattttctaatacaatatttgaccaattacgtaaattaccaattaaaataattctaattacttcacaacctaatgatttaatacctaaaattgaaccaaattgtgtaccaaatgaatttctagttgtattacttaaaaatgctctaagtaaagttcttgtaattcttggttttaatgtattatatgatgaactaaattcatcaataatttttttcaataatgatgatgataatttccttacttgtaaatgacctttatcatttaaattaattggtccaatattttttgataataataatgttaaaatacatggcattaatgaatgaatataaggatctaaaaatattgaattatttgataaaattgaataaattaaaattaacattgttgttaataattttaaattttttaaattatgtgtaattgtttcagctataaattgaattaaatatggaattaattgatgtaatccagtatctgatttaattgattcgaaaactgcagttttcaaactttcatttttttcaatatctacttcattttcttcatcatcctttaataaaacttcaataattttattaaaatataattgcatttcctttgataaaacatgtttaactaatggtttaatttctaattcttttttatcaatttgttgtttattttcaattgttgtaattccagtctttggattagttattaatgaaatttcttcattatttaaacttaacatattatctaatgtacctctttcattaattggtaataattttatatcatttaaattaggattttgtggtattgcaggttgaacaccttcaattgctaaccaatgagctgaacatgttgtaaatcttggtactttaggtaatggttgattaattaatgattcaaaatcaacttcatcatcttcaatataatataatgtttgaccaggtccaatcattgcttctttgaaaattaaaggttttgatgtatcatatccatataatggttctaaatttaaaattttcattgatctttcaatatcttgagttgttaatatatttcttttactatgacgcataaattttaatgcttgttcaattatttcattaattctatattcaatatccattgctaaatttttagcaacttcatcatttaattgaattgaaatacctaatttatcactaacatctcgaatagtatcatatggtgaccataatgtatgtgataattgtttagtactctgcgttacactaggtttattcttcgttcctcccttctttgacattgttattcttgtaaaaggaaatcagtgataattaatcaacagtgttaatattcatgttcatgagaaattaaattcattttactatatacacatgtgattacgtaataatatacacattatacacctttaggatcaataaagaacacttctccattggtctctctcttgtatgttaatctatcagctactgtagctgcaaagatcaaatgattcaatgtccaattacccctatcgaaaactgctggaattttcttacataaacttgggaataatgtttcatataatggtaaatattcattaatatcatcattatcaataactacagttttcttaacattttcaaattcttttaaaataaatgatgggaaattagattgttcttccaatgggtaaacttccttattagcaattctcataatccataataatactgcatgatctaatatacctttttcaattaaatcattatatgttcttgtaccgaaaactaataaaaatgcattgaaaaatgttttatcattagccattgctttcttaaatgataatggtttaacatgtaaaatcaatttcttctctaatttttcaatattctctaatgattcttggaaatatttccttttgtgattttctatatattttaatggttttagcatgagaaatagttaccttttcagatggtgtaacatctaattgtttaattgttttcaatttagttttaataatagcctttaattgtgataatccttcaagtttcattcttgatgtaaaacctttcttctcagatcttaatttaactaaatatgagaaaaaatttaataaatcatcacttaattgagaatttttatttataacaaaattaactgaatctgatgttgaatcttttggaattttaacaccataagctttagcaccttcaataacatgatgaatcaacttttaatgataatgtagttgagtcaaatttattaccctttaagcaaaatccataattaagtaaatattctccattacttttatcaccataattattatataattcacattttttattcaatttctctaatggatctaatgttttaaatacaaaatatttatcatcatcatcaatagtttcagcttcccatttacatctacttttctgttcatcatcagtattaagtaaatcaacaattggtaataaaaatgcacaattattttccttatcaaacataacaaatgggaaagctcttgatttaagaatacaatttgaccataaataagctgtaaaacttgtccaagaaatttctttaatatttaataaataattaactgcaactccaccatttggtccccattttaaatgcttcatattctaataattcatcctttaataaaggatatttggcaatatctaattgtgaaacaattgatttccaatcttctaaatcttttaaaaaattacgtttcatgaaaatatgtgcatctgtaccatctaataaatctttttcttccatattccaaaaaattggattaccagtttcaataccattatctggtaaagtaatcaatataaggtttaaatttcttatttaaattttcaccattaacaatagtttcatcatttttgtcaaattttaattttgataaaaggaaaatcatttcaatatctttattatatgtcttattttcaacatctgggaattcattttggaaaaattcaatactttgatcaggtaataacatcaacttttgtggaattttaattaatccttttgatacatcctcttttgttaaactatcattgataatacatgaaataccatgatctttaacattttcaaaacttaaattttcattgatatatgaaccattagatttagcccaatctaataaattattaagtttctctaacgacatttaggtagttggatacttgatgatttgaaaaaaaatgagtttatctttaatctgatatatattttttttttgacatgtaattgtatcaactctttacttcatcaataatttcggaatattccagaaataaagaaattaaaaactaaaaaagaataattaaatgatcgaacccaggatcgaactggggacgttatgcgtgttaagcatatgccataaccaactagaccatccgaccacttagttgttttgtaagtaatatgaagcttattagtgatataaagtgaatatctatattataatcaatagagacattacaagtggtatagtctgaaggatagactttaataataatgataatcaaagagattaaatgaaataagatttaatgaataaatttgatgaacaatttaataaaccaatgttgacagaaaatcaacggttatgaaaaatgatgggataggatcattaattaatttattatatacaacttctccactaattgatttagtcacgtcatattacaactaagaactgaataatagattccccacatggagaatcgggctggcttgtgagataattaattacagttctttaaagtatataaataacatgtataagctctcttgagcgggacatctcaatataggagagttggttttagaaagaacaagttttggataacacaacatctaactttatcttaactaactactcgcataccagttccatcgacagtattcgcatagtagtattaagtacaattagttacagttataattctttattgtattgaaaagattcaacataagtattaattatttgattacgtaatattttacgtacactatctacaatatcctcctaatactttacatggtagcacctttaggtcaatacaattgaagaatatttttaaaaaatttctacaagtacaatggttagagccagaaaaaatattcatcaaactgaaactccaacagttgaaccatctgaggaaccagttgtctcagactttccagaagttaaaatgattccatataatcatattaataagttctattgtaatccaaatgaacgtgatgagttcgttgatgcagcaaaacttaaacaaattgcacgagaatggttgtcaacattcaaagaagttatgattatgaatagaatcccaactgatttaagaattcactatgtgagaatcggccttaaaggatctgcccatttatggttatcaagtatagattctgaagatgatagtttaaagtggaatgattttgaaaaattatttaataaagaatattgtaatacttcaatagcaaataggcaaaataattattctatatgtcaattacaattttcttctgatgatactgttcctaaatttaatgctgaatttgaaagattgttgttgaacagagaaactccattaaaaccagactttgtcatggatttatatttaataaaattaccatcttacatcagagaacaaattgaaaatgcaccatattcaaattatcattattatcacaaatcgtgaatatactgctgaaaattatcaagaagatagttcccatgataacaatcatcaaaaggtcagaagacttaatgatcaggaatgaaaattcttaaccggttaaaatcctatattcagaggcaaattaaaataattatgctaatttaataacttgaatcatgattaatatgcttattataaattataatttttttttttctagctaaggctaaggcatacattaacaggttgatatcctataattttccattactttgtgaaataaatgaaaccattagagagacttaagatttttatcttttggaaattgtttttaaaactcatcgtgataaactttcaatagaagaattaaaaggaactgcagagcaacgtgcatccgcatcttccgaagtaagtataactcaatttagacacgatgaagggtatataataacctttactaacctcaaatatgattacctctttggttaattcactgcaatgagaattcaaatctaactttgaatttagacttactcaactatatttatctggtacataccaccataccaaggctgataaaaaggctaaaaggcaaatagttgaagatcatgataagaaattgccatgcaaaccctgaattagagacatatgaaaatttattgtatgttaaattacgatcaatattattctttgatgttgttaaaaatgatacctactgatttacttctagaaagaagatgttcataaaatccaattattaatttaacaaatgttattacagtagaggagttagagtttatgatttaaggaaattagaagaaagtataatacttcatatatgactgagaatttatggctcttatagctcttacatggaaatattactaatatcttatttaattaataaataaattttaatgctaggacaatatgattttgagattcaatacgtgtcagatcgtatgaatttttatgaattttgcagtaaagacacattatagtgttaatctgattacaaattgattatactaaataaattttgaattaatattatcaaattacaacaattatatcacaaagtgaacatcgagacgatgtttcccgagacgggaggatgtaagtaatatgaagcttattagtgatataaagtgaatatctatattataatcaatagagacattacaagtggtatagtctgaaggatagactttaataataatgataatcaaagagattaaatgaaataagatttaatgaataaatttgatgaacaatttaataaaccaatgttgacagaaaatcaacggttatgaaaaatgatgggataggatcattaattaatttattatatacaacttctccactaattgatttagtcacgtcatattacaactaagaactgaataatagattccccacatggagaatcgggctggcttgtgagataattaattacagttctttaaagtatataaataacatgtataagctctcttgagcgggacatctcaatataggagagttggttttagaaagaacaagttttggataacacaacatctaactttatcttaactaactactcgcataccagttccatcgacagtattcgcatagtagtattaagtacaattagttacagttataattctttattgtattgaaaagattcaacataagtattaattatttgattacgtaatattttacgtacactatctacaatatcctcctaatactttacatgtttacctaagcctatggtttttgctattgttgtgttgcttacgtaagcaggttttttattgacttatagttatactattttactgtttttatattaaacaaaaaatagttattggatactgtgtacagagaaatatttaaaaacaatttgaatcaaaaagaatagtaaaaaaacagcaatttaaatgcattacccgatacccgacacccaaaatttgaagcaattacaaaatacccgagaaatgggtacttttttcaaaatgcttttttttctaatgaattaacaaatataaagcgaatatgcaaaatgttatatagatatagatagcaaagattaatattaatgattcaattatagtggtaattctttgagtaaagagaaaattgaaaaaagaataggcctacttaaccaaccacctaaaatataataaccagttaatttatatttacttgttttattaaaagatttaatatttgctcttaatttagcaatttttctaaatttaacattattctcctgttctaatgatttgattaaagttttagtctttttatttttagtgataatttcttcagcttctaaaacttcagatattaatcttttctttgaattaataatttcatttaatttatcattatttgaattaattacattattattatccattgatgttacaattgcttcacgatattcaatttcttcatgaatctgaatcaagtaaatgtgaattttccatagtatttttacaaattctattaattctatcacaattataatcattttcattatttgataaattatatgcccaatctagtaataaacaatctttaatatcattaatattgttaaatttaagattagtcttgattatcaataattttaacatataaatcagttttataatctgttaaaaatatcatttgtaatgttgaattcttaaataagtcatcaagtaaactataatgaagtgaattaaatgtattatgttttgatccatagggataaataatacgagaaataaattcatcgggatattgtaaaaataaaatatcaccatttcgaatacaccagctatttgtcttaaacttttgattatttatcactctaatatcaattttagagccacagtatagtttgcaataataattggttttgcagaattatttgtaagataaagctgtttcatcacttcttgcctttgtgatattaatatttatcagattattaagattatcaaaaggtaaatcaatcccttgatgtgattcaagtgattcaaagcgattacctatatagatttttgattctggtttattttttatatttgaataagatacttttgtcaagtcaaactttgtactaattggatagttggaagtcattgctgctacaaagaagaaggtatgttctatattaaagaagtgaaataattgctatcctttttagatgagccctcatcttatcctaataaccctcttaataccttacccgataaattccaatgtctactacccgaaaacattgcaaattgccgaaaaaaagcgcacttttttgaaaatgcttttaatttcaatgagttaatgaattaatgagttaattataaagcgaatggttagatagcaaagcatgggaggtatatataagaatacacaagttaatcatttattttttgccagataacactgcataaaagataaaactgaaaaatccagcaacaaatgcatatcttggtctctttgatctcttacgtctatcaatctcatcttctaattctttaatagtttcattcttattagaaatttcatcagttaatgtcttaattagactatctgatgttttactatcaattatcatattatctgcattaataacttcagaaaataatctttttctcttatttttaataactgttaattgtctcatttgttcttcaataattggacaattttcattatttttattattagtaattggtgaaggtggtgtatttggagtaggatctataattaatagtttcaactttctttgatggaacttttggcattgactttggtggtgttgatgcccttgatgaggctttagatgatggatttgaattattattaagttcatttttaataatattatccagtctaataaaatgttcatcataactatgaactgcatcatctaattcaacatcaaaatcttctaatagatattttttaatatcttgtaaatttttaaaattaccactaatattatcacaatgttgctctcatatataaagtcattttgataatctgtaaggaaaattaaagctaattcacattgtttcataagtttcctcaaatgaaagctccccatctcttattttcattgaaaataataatatcaccatttttaacttcaattgaatcagttacttcatcaattaatgtaacactatggtcaataacattaacaacatagaatcctttatttgaatgatttatgaatagtaattctttccggttagaacgtctataaattgatatatgtttagggctaacagctttatgatcaattatgtaataattgtttttattaacagtaccatcaattttactaccaataaaaatcacatctctctgtgattgactgggaacaacgcgtgttctcttcaagttcaagactttagtttgaaattccatcttaggatgccaaaagaaataaaggataatgaaaggaaagcaaataaagagcctttcatctctttttataataaagaaaattgatgagccctcgtagaatgcgataagaaaattattatacgttattatacgttatgcaaagcaaagattaaattaaatttatatagatgattactaattattatgattgtttaacaactttatttatctcagtgaagtccgtttatgaactgtgggaaattagctggttttgattgtgaaatgaaaactggaccacattgttgaatttgaaaataatggataacctgaaagtgaatatggcatttgatgttgagtacaaaattttataattaattcaggatctgtataattatcaacatatcctggaaatataggataatgcattgccttccatctctgattctattgtatttgtaagtatatttggattatttaattcaactgaaagttgttgtttaattttcaatgctctaaatgtatttacattagtttccttatttgacatgaagaaaacagttgtatttgtacgaaatgtatgaattttatcattaagatcatctttttcaacttctaaattttgtgatacaattgattcaggttctggatttaaatgtataatttcattactatcattttcctcaacctcttcatcaccgtgatgtgaaattatatctttattatcattttcaaatacatcttctacttcgttattgaaaacatcaattttagtcaagagttgataaattaattattctaatattatcagatatttgataactatcttttgttaaatttttcatttcctctttaattatattactaactttttgcatatctttccaagaataaccatttgattcaaaaacagttataattctaacacctgaacaagaagcccaagtaatacatttagcagcttcatataaaactctaaaagattcggcggctttatgagtatgatgcattgaaatccattcagctctcttggctaaaactttagcaacttcctttcttatcaggtataacaattttcttttcataatctaaatatggtgttggtacctcaggtggtctttgaacaactaatggactcatttcaaaaataaaagttatatgatcaggtatatataatctaccagttgcttgtctaattttcattcttgatcttggtacaaatgatgaaactgatctttcaagtataatattacccaatcttgtaggtaataaagataattgattataataactgtaaattgtttcagttattgaattattaattgatgaatctgaagatttatttaaattaatagtacttgaactaaaagttgcagcaggtccaacagttgatacatcttcaggtaatggtaaaaaagttaataaataccaagtatatgaaataatgaaagtataaatttcgaaaaattgtgatgtaatccataacccatattgataaatagtaaaataaatacttagaatacgtcttaaaagtgtataaaataaacctgtaaaataatcactttgtgataataagactgtatttgtaccaggtacagcatatttaacacttgaagttaaattttggaaaacttcatcatcttcataaatatttatagttgaaaatagggtatcaccatctctaaatcttggtttaataattgatgattgaattgagtgagaagcagattccactgctgcagttacgtcgttcatttagggatggtttcctaaaaggaaaaagagtgtaatatcaagagaaaagacacaagggatagcaaaagaagatagatggaaaaggatgagccgccatattcaacaagattaatgcccccctccataaatcggtaattaaattaagccattttattgagattttacataataaacaatgtttatatggttaataataatataatataatatagagaacatagaaaagtctataaatctaagccttagcaataagagatttaatttgatctttacctaaagcttgtaaatcagaattaccaccaatatgtttaccattaatgaaaatatttggtacagttctttgacctgtaattttagctaaagcattttgaatatcatcaccatcttcaattttatctaattcaagaacgaaagcttcaggataaacttcattaactaatttctttgcagctgtacaatatggacaataagtctttgatgcaacaaatacagtctttgtattaattaaattttcaacgtgagcaattgtttgttgagacattggtttagttgttgtaaagaatcttctaactacggagaacaacttgaaagttatcaaaatgagaagaagtaagtggataatctccatttaaatagtaaaaagaaggcagagttgccactggacaggaaaactgtggcaaatttattaaattttattaataagcttatagtactaacatgaaaatcttcatttgattacgtaattatacaatatacaataactattacttagaacaacccacttcttttaagattttgctgtattaccatatctgtaactgctgtaagaatgaatttcattgattgagtatctgtagcacatgttctatgaacataaattggtctctttgtcttatttaaacttaaaaataatttctcaaaatattttaatgcatcctctgcatcattacttttaccatcaaaatctgggaaatatttacgtacaggtgatttacgtactttatctttcaataaatcaactttattcaaaaataaaataaatggtgtatttgcaaaccatttggaattaactaatgaatcaaataacataattgcttcatacattctattcactcgttcatcttcaaataacatttgatcatattctgaaactgcaagtacaaaacatgcacatgtaatatcttggaaacaatgaatccatttctttctctcacttctttgtccacctgcatctaataatttaaatttaattccattaatattaaaatttgtctcggtaataccagttgtcttaattctaccctttaaaatatcatcatcattacaaacataatcatcatctgcatattttttaacattttcaaaaaaatatggtgatgaacccttctaattgaaataaattagatttattgaaaacttgtttaatacctttatcatttttccataatttattaattgcatctgcaatttcatcctttgttacatttttattaattgttgatttaattggactattaaatttatctccaacataatcttttaataattcatcagtttccttataatcatcaattaaattatctgaaactaatgtaccatcagttgaattattattttcatcttctaaccatccaatatctgtacgtccattactcttatttcttctatctgttgcacttctttcactatatttaactaaataatcttttaaaaatgttgctccacctgcagctggtgtatcaatactctctaaaggttgataatttaaaatcatttgctttaattcatataatgaattatttggattatctgattctaattcaatacctaaatttcttgattgaataattaatgtttgcatacttgcaactgtatctgcccaaattatattcttatattgatttctctcttgtggtgaaaatcctcctaaatgtaataatctcatttgttttaaaactgttgatttaccactctctccagctcctaataataacattttaacttgatttttcttattagctttaccttgttgcatcattttctctaatttattatcttgtaatttttgtaattgattcatatctggttgtcttgtttggacattgttattatcgttaaaattattattattttgtttttgattaaactgtgaatcaactggtgtacttgctgtgcaccccattgtgtgtatatatgtatgtattatgtatttatgtctgtattattttaatttttaaatttatttaattaaatgtatcctaactagaagactagattgttaacccactacagctactaataaatagatgattatagaataagaaaaagaaagggtaaaattaaaataaaattagaataaaattaggataaaattagaataaaatgaaaacaatttacaaccgataataatcttatacaacatcctagaataactcagtaactttactataatttcaacaatctgaaacaatacctccagactgtttattgtatggtagcaaataaatgctacacttcctatacaatttaattccaattattcgcattttctgtttcatgttgcgcacagcccgtcttttgatctacttaaactctataaactctataaacgatactctaagtatcttggtcgtaatcataactggcaaatatatcgtattcatcttcaaatacttcaccactttcaggttcattaactgcatgaagtttactcgtaaaaattgtaactcttttagtaccctctttgattactagtattattattattattattataatcaccaagatttgctgtctcttcaataactggtttcctcttactcataaaactactgaatatattccaattatgtttcctaggctcatcatcatgtgaaggttttttaacattgttattattctcacttggattgtattgaatcatcttctttgtattatttttcaatttcttgaaaatacttacaaccctttcctgttcagagtttcttgaatttattaatcgtttactaatttctcttctcttttctctattaattttatcaggtctaacataatttttaacttgatattctcgtaatctttccatttcattacttgatatttgtgaatttcttgaaactaataaatttctattgaaaaattcaggtctttgaattaatggtatattagtaaatctttgtgttcttattaattgtccaccaataggattggaatttaatgttaccctattattattattattattatcaaaagtacttctagtttcaggtcgaactttatttgatatccatccccttaaaccatgtgatgtcatttgcttttgaatagcaattctatcgccatcaaatcctaatgctttatatttagtctttctcttgatattctttttggtaaattccatattattaaaaatatcatcatcatcatcatttctatcattttcgaaaacattatttaaattaatatcattagtaaaattatttgaattaataacttgaatcttcttattctcaaatggttcatctaatgaaattgattgattttcttgatctctcatatgattattcctgctgatcatcattatctccatttccttgtcctctttgacaatatgtatcataataattaggtgttttcaatccatttattgattttttactttctgcaaatggtaataaatatccaactcttgaataagttaaattaacactttcaagtaaatgtttctcaaatgaatctaatgatccattactttccattgtaaaattattaacaacacttatattatcattattatcattattcctttgaacaattttaggatcttcatatattttaaatgtttctctattactactctttttgctttcttctctttggttgatttttcaaattaatctcccttaatggttgtcttttaaatttctttacatcttcatttatttgataatcaattgatggaattggttgccaaaattgatcccattttttattaacataatcatttttcgaaataaattcagagaattcctctgatcttaatgatatcaatggtaaatttttaggtcttgaagtaagtaataatggattattatttggattaccattatatctatagaaaatccaccatctatttaattttaggaaagctctcctaaatcttatctcaaatcgatgatcattacgatgataatgattttcccaagcgcttaacattttaatattgtaataataattataataataataataataatactaaaatgaatcctttttattacttttgaaaaacactttgggggagggaataattacaagcaaagtttgtccttcagaaggagtatagaaaagataatgaaatatccattcatgtagtttcaaaagagaagttgtattaatccagcttaaaaattgccttgtttcggagttcttatttttttcaaattttaactatttttattggattttttatacagattttatatattttttttaatattttttttgaatttatgtgtgtatgtgtgtgtatgtgtgttcaaatgttgattggatggaagtaatataatacatcaataatatacaattttaattttaactttaactttaatcattctgattttattcatctctttcattatttcattaatttttaccaattagacttaaaaaacttctattaattaaatcttttaaatctttataactcattattaaacaagtcatttcatctggacttactaaaagtaaattttcatcaacacctgcatcaagtttatttaaacaatttataacatgagttaaatcaacaactggtttaccattttcatcaacttgatgaaatacataatctttaaataatttaattggatatctttcaccagtttctgaccatgaaccatctttaaccatttcaggtctttcacttataaaatctaattttgaaattaatctaactaatcttgcattctctaattcactcattaatgttgattcaaatgtatcacaactattttgtaatccattagttaattttaaaatcattggtgcaactaattcttgaaatttttcaattgttgcatcttttgaaaataaatatattaacattttcttgaaaacattagtaaattttaattgtgaaataatttcatatggatcttcagttggattttgcataaatgtagttgatttagctaagaataaaattaattcacctaaatttaataaatcatttgaatttgaatttaaatcagattcatcatctactatacctaatgatgatggatcatttgatgcatttttcttctttacatctcttaaaatatctttaattgctaatgcagataatctaattctacctttattagtaataataattttagatgaatctaatttaccaatatttaaacctaatttatttatttcagtaattgcatttaataattgaattgtataattccataaaatatcttcagtaattaattcaggatttttaccaggaaatgacataaaatgattttcaagtaatgtcattgacattggataataatcataaattaaaataagtgaattatcattaaaagctctagttgtgaaaacatcataaattttaacacaatttgcacaatcaacttttttccattgtttaaaagattttaaaactgatggtgtagtaattggtacatttttcaatcttctcattgtataaagtttaccatcatcatttgacatacatttataaacaattgatgtataaccaaaagattttgtattataatcataattatgatcaattggataaagtgaatgataagttccaacatgtaatggtaaatctaattcattatttgaaattgattttaaactttcttcattttttaattgtaaatattgtcttaattgattattaataaataaatcatcaactgttctttcattttgctttttatttaaattaacatgaggtggaggaggtggtgcatataaaaggaaattaactggatataaattagtattttgataaaataattcttcaccagttggaggttgaatattatttgaaaaattatttggtaaaatatcattactacttggctttggagtgaaaactggtgcagtcattggattaaatgatttagttgttggaagtgatgttcttaaagcattaaaatcattaagacctgatgatgtttcatttaatgtattgggtaaaggtgtagataaattattcagagttgatgaaatcgttgttgcaggaatatttgttgaaggtaaatttgaattaatttgatatcccagttgaggttgttgtgattgttgtgattgtaattgttgtgattgttgtggttgttcagtactgttatttgaaattgttgatggaataaatgttggaatttgatcaactgatggtgataatgttgaaaatttacttaaacttataggtgtaaaagcgggtgaatcaattttgaattttttattatcaggggttgaagaaccaaaattagaattaattgaatttattgatgtttgttgttttaataaagttggtttaaaaatgggtgcctttgatgcattatttggatcaattaaacttgaatttgcagaattattattattattattattattattcaatgatgcaagtaaagcagatggagatactgatttacctaatgctgcatttgttgttgtagatgatatagttggagatattggtgatgaatcttttttctgttcattttcttttgctaattcatgattatatgaacaacctttatgttcaaatttacaaaacccatgaatttgaacattcctacaaggaatattcttagcccagtcatattgagacgagctcattgtgtttttatatattcaaatgattgtattagtatattgattataattttttttcctcttttcttctaattagtaaagaaaatttataaaaattaatgagaatttctaatgtacagataaattaaggcaaaataagttgaataatataacaatataatgcaattgtaactatataagccttatttgaagtgataattgtttaaataaagtaaggaaataagataaaataaaaagaaaatgatacaatacatacacccatccacaaaacaaacagcgtcaattttaatgttattacattttcagataacaacaattgacttttgatgaatttcaactgctaagaaaaaaaatatcgtgtttgattatgtaatattaaaaaatagagacattaaaaagtaaaaaaacttaaacactgaagaattccgggataccttcttaattatggggtcaactgggaattgaacccagggcctcctgcacccaaagcaggaatcataccactagaccattaaccctaataagaagcgacaattcaatcaaaatgttcaagaaatgtccctccggccgggatcgaaccagcgacctcaagatgtcttgtatgctgtttaagcctattacagtctcgcgctcttccaactgagctacagagggtttctatgatgtttgaaaatgggtgattatcctcggtgttaagattttgaggtcacgtgatttgcgtttttttaaaaatactgataaatttgactatatgacaaaaatactttttgaattttgttttaatttttagcagttaaagtcttttaaaaatagtgagaaagtttaaatatcaacaaaagcccttaaatcacggaaatcattagaattcattcaatatcttctatacaaccatacaaagatgactatgaacaatcatcatagtcattttcatagccgcatctcatatgctacattcctatctaatattctctttattatttcctaaaacagacattagataacattaatttgctcaaattttaggcgcacatgagtcagaagcgagtagatcaaacagttgatttttcacgtcaaattgataattccgataagaaatttttcactattatcattttttcttctttcaatccctccaccaagcgatatgagttatacaatcaatcaaattaacaataaattcaacttaaatgatgagggattaataaaagcaagaaaaatttatgaaaatttatcagtttcatttaaaggtccattaacaattgaagatttcaaacatttagaaatggaacattttgaagatattaatggtaaatcacaatttttttatttaacttctaacaatggtgatattgtttcaacttgtgaaattgtacctcgtaaaggttatcatgaaaattcattaaatttattattaactatggtttatacaaatccaaattatagaaagaaaggattaatttcaaaattattaaattgggttataaaattttatgaaaatcaaacaattgatcatgatgatacaattattttatctgaatctattacaaataaggaatgtatggaatattttaatgaagctgttccattgaaattccgtgaatctaataatattaattggtcattgtatagtatagttggtacattctatcaacaatttggttttaacccatgtgacgaaattaattggtttcaaataaattcaagtgattttccaaatgaaggagaatttcaaatcaatgaaacaaatgaaaaattattgactaatgaagatattgatgattattattttaatgaaaaatataattttactccagttaatgatacacaattacaaaattgttcattagaggaatcctcttatgctggttttgttgcaagatatcaatcatatattgaatttaataaggataagtttaaagatgatgatatcaaatttgctaaaaattgtggtttttacattaaggaaattgttaatggtaaagaatatgaaactattgcatttatttgtccattctttttcatgaatagaattgttattaatagaattttcacaaatgttgaagatgaaactattttcactaaacactgggaaagaattactaaatttgtgtctaattatgctcaaaatgtatggaaaactattccaggtttggaaacttattcagattctgataaattagttatgacagctaataatgatattgttgttaaatctgaaaaccttaatgttcaagacatcactgatataattaaaaaatccactggttgggaagatgtaggtttaggtatggtattaccaatgattagagattggaaatcattaaaatcaccaccttcaaaactggctcataatggtcattggtcttttatgtaatagtagtgtaagtttacagaataattagaatttatataataaaaagtttaaaaaaattagaaatagaatctatttattaattactttcttggtttaacatcatcaatccaattttgtgtattcatttgtgtaagtctacttaaagctcttgcaaatgcaaatctttcttcatcaagatgtgcaaacatgaaagcttttttagcaatttttttatcaaaaccatgttgagaaaccagtaaatcattttccattttatcatcaatttcttcaggagttttatttgataatgcataaacactatcaccaatattttcaggttcaacgaaaatatcttgaaatggagctgcagcagtaactgcaattcttgaatgattatcataaactgcatctaaaaatgtaataaatcttctaaccatatcacgttgatcaactgttaaataaggtatatcagtaacaataattgattcaaaacttgtagctaaagttaaataatcacctgcagctaatggttcaccacataattctttaaaagtaaattgtgcaacataaggaggtgatgcctttggaactattaaatctctaccccaaatacgtaatggaacattattttcaattttatgaccttgactgaaaaattcataccataatttaatatgatcatttctttgtttagtacaagattttgagaaataaccaacaccaggttttgggaaataaaatgcttgtgatacaggtctcggaattttacgataatcagttggtgaattaaggtaaataacatgagtaacatttttaattaatttaatacatggaataaaactttctctttgaataccattaatatataaatcatcaggagctctatttgaagttgcgaaaagaactaaaccatgatcatatcttaaaactaaatttaataaacgacgtaataacattgcatctgcaacatcagtaacttgaaattcatcaaaacataaaacagttgcagattttgataattcccaagctaaatatggcataacatcaatatcttctctattaccatgtaaaacttttaattgatgagctcttttatgaatattttgcataaattgatgaaaatgtaatcttttctttgataaatgaggtggaattgtatcataaaataaatccattaacattgttttaccacaaccaacatcaccatataggtaaataccatgaggaatttcaatatcttgttcattttcaacttttttctcaattgatgaaaacagtgaagaaaaaacttttgtaatattaaatgatgaactactactacctttaatatttctactttgtgttatatcaggttgagcaacatcaggtggatgataattcagtaaatctttatataaatgttccatactagttaatatacctctttgaaattcatcattatttaaacgaccttcattaacacgtttatcatatagttcaagtggtgaatataatttattatttgcagttttagaacctgaattcaatttcgtcactactggagtatcatttttaattattggatcagttttagatgcaggtgtgaattctgtaccagcagttgaagaaactgtgggagtaattgtcttttgttgagttgttgtctgtatttgtcgtataaaattggaatatctgaaagttctacaagtaaatatagttttcgatctttgttttattattgttgatatcatttttgtgtgtttggttggtaatgtatgttctataaagttgaatgttgaatgttaattgaaaaaaacagaaaaagcaaaacagttaagtaatctctagatctatctatctatctatctaccaatatacctttacttatcaaacggtgaccttccttgtcatctccggcagaaagcttcaggaagaaagaaagagaggaagattaaaagcggagaaatcggatcgtcggtggaaaaaaaaatattttattttcattttcacttctctacacttctattcctttaaacacactacacagttctatatatccatctctagatctaagtcaagatcaatagcatcttcattaataggcgtagtatccatatcttctccttcctcttcctctttatcaaaattaggtcctttcatagacttaacaaatccaacactatccttatccgtattccgtgtcggagttttatcagcggagttgttgtccattttaggagatgatgcaacaaatactttttctaaataaattttccttcttaacatctccttataagtagtttcattaccattctcaagttcaaatgctttaaataatgaccaaattctctcacgatcctcttcattatgattaaattccattatattatcacttgcatattcaagtatatttcttgcatttccaatattacctaatgaaacttcaattgttacaaatcctgtaacaatttcagtaatataatcaggtatttgaactgatatagtctccattgcatctttgaaaatatcaattacccattgaatacctttaaattcaattgtattaataattaatatcttatataattctaatttatcaaattgattattcatatctaatattgcctcttgtaatattttcaaacatctcatctttgatccatatttcatttcccaattagaataaataatataattttttttcaaattctttaaatctttctcttcattaaaataatcaattccattctcaaatatttctctaactctttccttatcccattctaaatattgccaaaattttaaaattttatttaaataaatctcataaataattgttttagattgtccattgaacatcttcatacctctttcataaactccaaaacatctctcatattgttcattctcctccaaataaagtgaataattaataagcataacaccattgacaattttcaatgaaattgcttgttcatatgcatcacatacttgttcaaatttataatctttattattttcaattaaatctaaatataaactccaaagtctaacacttttaaatattttcatttgaacacttaaatttttatcatcgggatcaactctaccttgaagaatttgttgcggtatttcaattgaatgtttagagacagttgttgcatgttttaaatcttccttacctgtattcttttcagaaaattcaagttcaatcataacccaattaatccaaatatcttctaattgttcaatttctgtccatggaacatttgttgcaatctcaagtattttacgacaattacttatatcattattatcataatatactttagcataatctatccaaagtttagataattcatttctttcattatatggaactttattaacaataattttaacaattgcatctgaataacatgcaagaatttcattaacatttgcacgtctttctttcattatttcaattctatcaaaccaaacaccaggtatgttaggattttgtgctaatttgacattcatttaataataataatctattcagataataaggattcaaatttgtccaaaaactttacaagttttggattggttttcaattcatcctcatcagtgacggaaacaagcttttcttccaatacaccagttaatgaatcaaataataatgtaaaatctttaatagatttactttgtttcatcatcgactctaatatctctatacttttatcaaattgatcgatattgataagatatttagaatatcgtatagtaaattgactttgttgatctttaaattttttaacgatatcattaaaccatttctgcactcttttttggaaattcccatcacttttatatttactaactgctaaatctattattttatcaaaatattttttgtaaatttctaattctgaatctgtacagtgtaataaatatgtaggagtaatcaatgatttgaaaaatgtttcaaaaatatctagttgttcaacagttttaatatattcaagtaatctattgaatgttttattcaaatcaggtattctatcattttcttgaatttcttccatatttatatgaaatttataacaattttgtaaatatttagcataattgaagtaaagcgtaaacatcagttcatttgtaacatttcccatcttcactatatgatagagtattattgcccatattttaatatgatcttctcttttcaaattattcaatgctttcctgaaaatggagagtaaaaatttatatgatattgacattttaaattccacaattaaaatgaaaaatttactccaataatctacatcccttataatactatatttatcagttgattcaattaatgataatattttattaaattcagattcaatttgttcattactcgttgatttttcaataaatgatttaatagtttttttataataatcaataaatttattccaatattcgattcctttaaattctacaaactgtcgatagtataatgataataatgattgttttaatattcgtataagttcaatatcattatttgatccagttgttgcttcaagtaattgttgatgtttatgatcgatataattattccataaatttacatcattcggacttttcaaaagttccatttcaaagggtatatcagattcatcaatcccgctcaatatcccctcatcattgttcatattgagtgattaataaaggaaatttcagtgatcaaatacagtaaagattcatgctttaaggtaagataactaaggataatgaaaaaaaaattatcttaagtaatacaaaatgcacagtcccatcgacgctcaatgttaattttgcagcactaaaatttggctgcatgaattcaaactcagtcttttatcagaggaaggtaactctcttgattggtatctaggaatagaactattcatcaatgtccggggctgctaataggtatgtattaattggaagattatagagggattgatagattgactattgttttatgccaatgtcttattacaattctttattgatttatttattttcttttatagataagaaataggatagaataaagtagaatagaatactaacttttcatataatatagagaacaagttttcccaacacgtatgacacttggtgttatgaaggggaaattaaagggagcacagacaggtcattcattattaaagagaaaatctgaggcatttaacaaaaagatttagagatataactaaaagaattgatgatgcaaagagaaaaatgggtagagtaatgcaaacagctgcattttcattagctgaagtttcatatgcaactggtggtaatataggatttcaagttcaagaaagtattagtaataatgcaagatttaaagttaaggcaagacaagaaaatgtttcaggtgtttatttaccacaatttgaagctgatattaatgaatcaattaatgattttaaaatgactggtttaggtagaggtggtcaacaagttcaaagagctagagaagtttatagtaaagcagttgaaactttagttgatttagcttcattacaaactgctttcgttattttagatgatgttattaaagttacaaatagaagagttaatgcaattgaacatgttattattccaagaacagaaaatactatatcttatattaattcagaattagatgaattagatagagaagaattttatagattaaagaaagttcaagaaaagaaacaaattgcagttgcagcagctgatgctgaagctaaagctaaaaaattaaaagctgaaaaggaaagattagaagctttagaattaaagaaagctcaattagaggctgcaaaggaaaatggtgaagatgtaaaggaacaaataaaggaaacagaagaagctaaagcatgctgttgttgaagaatctgtagtggaaggaagaaaaggaagaagaagaagaacaatcaggagatttagttgcacaaactgaagatgatgttattttctaatctcttctagcttataatatcatatatattactgtataatatacataataataccgctttattattgagcaaatcgtagtataaaagatttgtagagctagggtcaaaatattcgaacatgcgaattttgatgatctaaacctcaaatacttttcatgttggtgaagttgtatttcttttcataacaaagctaatgtcattatttaaacccattctaacattttggggtcttctaatagcttttataatatgtatttatacatcagattatttaaaattgttaactactataccattagatacttatgaatatccgaaaacatttcatccagatataatttatccaatattggataatttatcaattgatgcaatcaaattagatttgaaaatgttaattaatgatttaccaactgatagatactataaatcagaaaatggattaaaatctgcaatttattttcaaaattacttacaaaatttaaaagataatattaaatccgatacattacgtgaattaatagaaattgaaacatttaaacatcaatggaaacaaccaagtattttgtttaagttaaataacagtaaaggaaatcgaaatgaaaacaaacaaactgtgattattggatgtcatattgattcaataaatttacaattttcaaatgaaagatgcaccaggtgttgatgataatttatcaggtattgtagttattcttgaaactattaaaaatataattaattatttagaagaaagatgaaacaatcagtttagagaattcaattgagtttcatttttattcagctgaagaaattggatcagttgggtcaactgaagttttcaaacaatataggaaagaaaataaacaaattatagcaatgtttcaacaagatatgacagggtacacagaaaagacattccaatcaggtgaagttgaacattttggattaatcaaagattatgcatctgagtcaatgctctcatttacaaaacttattattgagaattactgttctattacatatttagagactgaatgtggtaaaatatgttcagatcatatatcaggtttaatgtacggatatccaagtgtttatgcattagagagtaaattagaatatagtaatccatacatacattcaattaatgatactattagaacatattgattttaatcatataatggaacatattaaattaacaatttcattagctatagaattaacaatcaccaagtcaaccatggtaactgattctaaaatttctgataaggtcatgttcagatatatcgattttatgatactattaatgatgcatcataccaaagtatttgtttacagtgtcatacttttcgcatgtgtcatagcatcaatatacaatttgtatcttgattacaggaaatcattaagagataatgatggtaataaccaagttaatgaaattgaactccccacagaagttgaaagagatggtcatgagataaataaacgcagtggtcctttccccaagggtaaaaacagaaagaacctctaataacagataagataataagataagataagataagaaaatgacggtctctctctgtggggaaaattaattttttttgacacattttaccccttaactgatgaccatgcccccctgttttggatctataaatatagagtatctcccccaattgttatctatttgatgttgtttctactttaactttgtttcttttaaacaacaaaaaaaaatttaacaatgctatttgatactatgagacataatttaatgaagcaaccaatatctgctccaacaattgcgattggttttatgggtggtgtggttttaccaatattattaactaatgcaattgcaactaatcatccaaattcaatttatcaaggtaaaacaaaaggtgagttaaattcaattcattataatttagaaaatttaaataaacgaataactaacattcataaccaaattgatcatacagatattgatgaagattatgacttcaatgatattctcttttgatcactgttttggccccatacccccatattattaattaatacagataataatgataataattacaacactttaacgacaagtccagtagttttcaattactgaactttatttattactagcatataatatgatatttctttcaaacactatatgaggatatggagttttattgtttatcttatactttaattttttaattttattatctattttcattttcatttcttttactttttactttcttccttgcatcaattaacaaatttttacatgatgttatataatttttataatttttcattaatttaaaagtttattcatcaagaaagtattaattattaataagttataaaagaaatatacagagtaaaaaagttaaattatttaatgagcagttggttcaacatttggtaattcaactaatgcttttttaattgaatcaacaccctttaataaatcttcctttgatatcactaaaggtggagctaatctaataatatgatcatgagttggttttgctaaaacaccaaattttttcattaataaacataaatcccaagctgatctaccattagttttagtattatcaacaacaattgcacataataaacctaaacctctaacttctttaattataccatttgattcatttgctaatttctttaattcttcttggaaaaaatgacctaattcatttgatctatcaactaatttttcatctttaacaacttctaatgcttcaattgcaactcttgaagctaatgcattaccaccataagttgaaccatgagatccaggttctaaaactgacataatttcctttgatgataaaactgctgaaactggtaaaacaccaccagaaattgctttacctaataaaaccatatcaggtttattatctcttgaaaggtaatgttcccaacataacattttaccagttcttagcaataccagtttgaatttcatctgcaattaataaaacattatatgctttacataatgctttaactttttcaaaataatccattggtggaacaacaatacctgcttcaccttgaattggttcaattaaaattgcagcaattttatcacctgcatttttaaatgctaattcaacatcttcaattttaccatatcttaaaacttgattttcagtacctggaataattggtccaacattttttaaataaggaccaaaattagtctttgcatcaggatcagttgacatagagacaattgcaattgatctaccatggaaattatcttcacatgataaaatgattgcttcatcaggattaataccttttttaacataaccccatcttcttgcaatttttaaagcagtttcaacagcttctgcacctgtattcattggtaaaacattttcataaccgaaaaattcagtaatatattttgcatatgaaccgaaaatatcacatgagaaagctcttgatgataaagttaatttttgagcttgatcaattaatgcattaataattcttggatgacaatgaccttgattaacagctgaataagctgaaaggaaatctaaatattcatttccttcaggatcccaaacatgtgcaccttttgccttatggaaaacaactggtaatggatgataattatgagctgcatactcttcttcatattgagttgcttttgctgatgataagttatattctgcgacaggaagggacattcttagttttttgtgattactttgaatagaaatattcaagaaaacaagagaaatgaatctacatgtaagagcaattgatgatgaaaaaaggggggatttcaagttgtttaaatagatgaaaatagatgaaaatagatgaaaataattaaataattaaacaaaaatttgaagaaacagtgtattaattcacctatttatttgacagctatggttgaagagtcgccaattcctgtgcatagcgatttactatgttgaaattcatgtttttttgagccacccgcttatcttcctctgtcggttgaagttactgtaaagggaaggttttgtagaatttttttctattttttcttttctttaatggaaatggaaggttttagcgagtctattttgaaatttacctattttggctatccatgattatcttagagttatttaaagctgtgtaaaatcatacatattatttataacaaattattcaaacatatttaaaattaaaaggaataaggtaaagctatttgaattcaacactatgaattgaattacttccctcattatcagaattattaatctcatattgtgtggcattaacttcaatatcatgtttctcaatttctctaacataagtagaactttcatcagttgaatcatcactaccttcaatattttcaatgaaaaattcattattatcaacatgtctcttacctgcaatttttgggaaatattttaaatcatatttttctaaccataatccagctaaaaatactaaatgtgaacatccaattaaaacaaaattaataatataacctttcttaaatcttggtgcatctttaacattatattgtaatggaattgcaaatgcattaactgcatatgataatgcttgaacccaacttaaaactaatgcttttttctcaacattatccttacataatgttgcaatccatgtataataaacttgtgctaatccatctctaaatggtctctctaagaaaaatgctgaaattaaaacattatttggtacattccaaataactaatataatacatgcataataagtaattaacataactgaattaacaggtaaaaattttccataatattgacaaattggtgcaaccattattgcacatggtataccaacaacatacatataagaatcccatgttgtaaccattgaagttgtatataaatcaggtcttgatttcatatataattttggtccattactataccatgattgatgatgtaaaacccaaattgctgaaccaaaataaacttgccatgttgaaattgtttcttttaatgtaccccaagtaaatctttttggaaatgctattttattctctaatctctttctagcaaatatcatatcatcttcactgaaaaatgcaaaacttttacatgctgatggaatacctgggaataagaaaaaaccataaaggaaaataccaaatgtaataactgcatcaatgataaattgccatctccaaccagctaatcccataactccatttaaactttctcttgcacgagtttgcaatgcacctgaactagcattacctgcaactgcaaatgcaccatatacacctgctcttttaaataattcttcctcagtgagataacttgataaaataacataagttgcaggaaatgaacatgcctcaaagactccaacaaaaaatctaattgcatacatttgtccagcactagtaacataggcattagctaaagtcatcataccccaagctaattcacagaataatagcaaatgtctagagaaatgaggtttagtgatcaacaaggtgattggaatttggaatagtgcataaccaacggtataacaagtattaaaataattcaattcattaccatgaagattcaaatcagtttttaaaccggaaacataagctgaaccaacatttgcattatccaaatactttgtataaaacgaagcacctaagaaaaataaaacaaaagcatcaaactttataagaaatttacgttcataaggactataatgttttggataccaatcaaaagcttttaaaacattatatttatcatattttgaaacttttgctgctcttctatccctatcaactgttggatcattatattcttttttaaaagattcagggtgatcaattttgaaataaggccaaacgtaattttttatggcagctaccgacatctttagtttaaatatttattgactattagaggtgtgagttataaatgagtaataactattaaagtttttcaatcatacctagaaaatggtagctatttatacatcattttccacatacaggaaaacttttccaaatgtataaaatcaccctgtaacatgaataaataaacttttcattccatagaatccgttcaaagtaatagataagaaaactgtggtgttaatccaacaaaaatacaatacgattactaatttaatataaatagagaattataacgtggttaatcatgttcttcccatggggtgaattccggtacaggcacggaaagctgctctgccacactttcactgtcggcgtttcttgcttttcacgatcttttttctttcttttttcagattgtcccttatttaccacaatagtggctcaatctttttcagattttatcaaagtgcgccctgtaattgtcggagattttggtaatttgatatatctgatagcagttgatcattaatataaatgattcaatccctatttaagtatcaagttaactgttttaaaacactaattaattacaaaaaaaaagtatataacgttttgaaatgtatcaaaaaagaagggtttattcccatttctttaatggtaatcctaaagcctctctttgagattttgattccggatcaaaatatggcttttcagctaatgatgtgactcttgtaccatgtcttggactctttccttcatgatcccaaacatttctatgtgtagaaatcctgttatcccaaatagcagatgtaccataacctggctttgtgttcctccatttaaatctaacttgaatatccgcatttttttcataaatgtcaaataagaaatttaaaattaaatcactttcaattggagagacaccaacaatacgtttagtcatacctctattaacaaataatgatttccaaccagttgctggatgagtacgaatgattggatgaattctttcaactcttttagtcccacctaatggatcttttctatcaagataactatgtgctgaaatataaactgcttccttaccatctaaaaatttcttaaaattatcacttaatttatcataagctgcatatccggatgcccacatagtgtcaccaccagtttccgggattgtatctaaatgtaaatgagtataaccagctggttgtctttcatgaactaaatcactatgccatgcattgttacctaatggtaaatgcctaacactatcccaattactcatattaatattactgtaatttaaatccaatcctttttgaatcttataatcattccaaatgacagttgcacctggtaatcctgtaacgtgtggtacctgaggatgtttttcaacattgccaaggtaatcacctaaatcccattgtgcttgaggagatagtttttgatctctgaaaaatacaacaactctttcagcaacaagtaatgccaattcgtccttttgttgatttgttaaatcctctaattgtaacccgacaatttcagtaccaactttatcagttaaattaatcacttccttagctgcaccaaataaagcttttttctccggatctgcatgtttagctctatcatcaaatgaaacatcataatctctaatagcgtaagcttggtcaacaaaaactggaatatcatttctatcaggaacttcagggtacccctttgataaatcaattccaccatcttctaatctttttctacttgcttcaggtaataattttgcaccatcatgatctgcaccttgttttaattttagatttgcatcacgatgccttgtaatatttaattctctatgagttctaattaaattttcaattgtttggtcaattggtgtatcatcaacaacaatcagttttttggactcaattttaggttttgaagtagattttgtagcagtagtcatcaatggttgattatcgtttacaatttaaaaaagaattattcaaaatgtgcttttccaatttatatggttagatcaaataaaaagttaattacactggtcagtaattactgttattaataatgttcattttccaatataattgacatcagataaattgctaacttatataagagttatagccacagtttagccacatatgatttccgttattatatctagtacagtatcgacagctttattatacaatgatatgttttaattaagtgtatttacgtgtttagttacatgatttgctatagaaaagtttatgatattccagcatcccatttctttaatggtaatccaagagcctctctttgtgattttgattcaggatcaaaatatggaacttcagctaatgaagtgactctagtaccgtgtcttggactcttaccttcatgatcccaaacatttctgtgttgagaaactctgttatcccaaatagcagatgtaccgtagcctggcttagtattagtccacttaaatcttacttgaatatctgcattcttttcacatacatcgaataaaaagttaagaaccatgtcactttcaattggggaaagacctaagatacgagttgtcataactctgttaactgctaaatatttccaaccagtagctgggtgtgttctaactaatggatgaattctttcaactttttttggaccacctaatggatcttttctatttaaatatgaatgagctgagacatagacagcctttttaccatctaaaaatttcttaaattcatcacttaatttatcatatgctgcataatttgaaatccacattgtatcaccaccggtttctggaattgcatctaaatgtaagtgagtgtaaccagcaggttgtctttcatgaactaaatcagtatgccagacattattaccgatagctggatgtcttacactatcccaattaccaaaattaatattattgaaatttaaatctaaaccttgcttaattttataatcattccaaataacagtagcaccaggtaaaccagttacatgtggtgcttgtggatgaacttcaatattaccataataatcacctaaatcccattgagcttgaggtgataatttttgatctctaaagaaaacaacgactctttcagcaatcaataatgctaattcgtccttttgttgatcagtaagctcagataattgcaaaccaacaatttcagtaccaactttatcagttaaatgaataacttccttagctgcaccaaataatgcctttcttttcaggatcagcttgagaacctctatcaacaaatggaacatcgtaatctctaatagcgtaagcttgatctagaaaaactggaatttcatctctgtttggtaattcagggatacccctttgataaatcaactccaccatcttctaatctttttctacttgcttcaggtaataattttgcaccatcatgatctgcaccttgtttcaattttaaattttcactacgttgtcttgtaatgttcaattctctatgagttctaattaaatgttcaatttgttgatcaattggaatatcatcaacaatttttaaatttgcttgtttgacatctgatggtgccgaggatgaagtttgtgtctcagtagttgttgccattttttactacttttcaagatttaatcaaattcacttaatcaaacaaaccaaacgggtatagttggaacttcctccccatttatattactgtatgtttcaacattccgctgatcattaagtttggtaatagactcactatataaatcatgccagaaaataaataagtcactaaccttaaaccggaattagccacagtttgccacaaaattttgagattcggagatctgacttataaattgacggaaaattgctatccactggtggtggctctattattttcaatatggtatgttaattatagttgaatattgtggtatataaaatgttgtggaattgtatcatataagggatgatataaataaaaactgaagaccctccacgtaattattcatttgactggttggttttaaagtttgaattgatttgaaattatttcgtgtatttaaacaattatttcaaataactaacaacttattatgacagttggaaatgcaaataaatttaatatcaagtctattgcagtaattggtgctggtccatcaggtattgcatcacttcatgaacttacaagagtaactaagagtggtgaatcattatttgggctcgatgacgtaagcaaatatgaaaaaaatggtgaacttgcattcgataaagtggtagcatttgaaaggaattcaacagttggtggtgtttggtgtaagagtgcatttgcggaaaataatgttgatccaaatttacctaagatttatcaaaaaacttctgatgaattggataagttagatttttcaaatccaactgaaacttatcaaaaaactccaattgatgaagagttagagaagaaattagattcttcaagttttgaaaaaccagtttctattccagtaaataaggaattagaaactattattaataatcaatggagatcctctgcggcatataatcatttgtttacaaatgttacaaatagatacatgattttttcctttaatgatatagttggtcaagaacttgatgatttaaatcataaatatgaacatttactgaacttacaatctgcaagagatgtctctgactatcttgaaaaaacagcagaaaagaaagatttgaaaaaatatattagatttaatactaatgtagaaagattgaagaaattagataatggaaaatgggaagttagtcgtaagttatgaatcgaagaataataatggtgagaaattcattaactggtataaagaatattttgatgctgttattattggtaatggtaaaacagttccaattattccaaaaataaagaatttatttaaatttgctgaagttaataaggataaagttattattaaacttgctaaatcaattcaagatactgaatttcttcgaaatgctaaaaaaccactatttattggatcatcagtttcaagtgttgatttaattcaatactgctatccaagagatttggagaaatccttcaatttatatttctagaagatcaccaacatcttcacataattggattacgtttgcaacatattcaaagggtattgttaataaacctgagattagctgaatttataccagaaactaattccgttaaatttattgatggtacagttgaatctgattttgatgccattgttatttgtactggttatcataaatattatccattccttgatcaatcatttacagaaaagcataaggaagaagcaattaatttttacaaatatacattttcaattggtgatccaacattagcattaggttggtaatgaatatgcaggatttttcttcaatagggttgaatcacaagctgcagcattagcaggtgtttggaataatacatcatttttaccaccaaaggaagaacaaattgaaaccaataagaatcgcccatcattaagtagtggattaattaatccaaatttcataactccattaatagagcttgcaccaaagggtagaccacatccatttgttattcaacaaagaaaaagagtgatcatgttgcacatagtgcacaaggccattttgtgatacaggatgtattctttaaagttagagatggtaaacttgatccatttaaaattgtctaattattctttaacttgtctacactacaattatatagttttcatattcatttaataaacatctactttcactaactacagaatcttagcatttgtaagaacatcggatataaaatgaaaattaccgaatatcataactgcatgatctcccacatttcgccaataccccaagaatgatcatgatacgttgatactgtggtgactctcaataaaacttactgataagaagcacgttacacactttcagagtcacaattgtgtgaataaccaacaattcagttaattgactcaattaataatataaaaagccacagtttctattgtgatggctcaacctttgttcaggttctctggtatatatcccactgtaaagatggtttcttatacttgattaacatctatccttcttccaaggaattgtaatacagttctacttacaggttacttattgtatatcattaacatcaccaagacaatgtttcagcctaagaagagggttattaaggaatacgaaaaatattctcaatgtcctacgtcaaaagactcaactcatcgacatcgtcatcgtcatcaacagtgaaaacttcaattccatcaaatggtagtggtttaggtaaacaatcaattctttttgtatcaggtatactagcaggaggttcattagtttattatcaattgaaaaactaatccttctgagacaacattcccgaattcttcaactactaaattaaaggattgtgatgagttaaaatatggggatgctaaggaagcaatttttgaacttaagaaacaattaggtgaatctaaagttacaaatactaaatttgaaattgaacatcatagtgatagttcatgggcaactgatcatgcaagacctgatgaatatccattagctattgtttatccagaatcaactgaagaagtttccaaagctttgaaaatttgtcatgatttaaaagttccagttgttccatttactggtggtacatcattagagggtacattttatttcaactagaactggtatttgtattgatttatctaaaatggaataaaattattgaattacataaggaagatttagatattgttgttcaacctgctgttggatgggaatcattaagagattatttaagtgattataatttactttttggtccagatccaggtcctggtgcttgtattggtggtatggttgcaacttcatgttcaggtacaaatgctgcaagatatggtacaatgagagaaaactgttgtttcagttacagttgttttacctgatggtacaattgttaaaactaaacgtagaccaagaaaatcatcagctggttataatttaacaaatttatttattggtagtgaaggtacacttggtattgttactgaagttacattaaaattgaatattaaaccaaaatttgaaaactgttgcacttataccatttaataatttagcaggtgcagctaaatctgttgctgatattattcaagaaggtattcaattaaatgcaattgaattacttgatgataaaatgatgcattttgttaatcattcaaatcaaactgaagttaaatatgaggaattaccaactttattactaaaaattggtggtacttcacctgaggcaactggtacattaactaaatctgttcaagatattgttaaaaagaatggttcaacaggttttaaatttgcatcaagtgaagaagaaaaatttgaactttggaatgctagaaaagttgcattatggtcaactattcaatatggtaaagatacaattgataaagatattcaagtttggagtactgatgttgcagttccaatttctaaatttgttgaatcattagaggcaacaaaggaagaaattgaaaagtcatggtcttgtatcatcaattgttggtcatgcaggtgatggtaattatcatgcaataattttgttcaaggaaagtgaacgtaaagttgcatctcaacttgttgaaaatatggttcaacgtgcattaaaattagatggtacagtaagtggtgaacatggaattggtgttggtaaaaaggaattccttattgatgaagttggacaagatgctgttgatttaatgagaaagattaaatttgcaattgatccacataaaattcttaaccctgataaagtttttgcaattgatccagttaatgatagaactatatagagaaaagtacttattaatcaatttagaacattatagtattagaaaataactgtaaaattagtatacgaaatagaatgaatacactgagtatataagatcttgtcactaggaaagttatactgatattacgtaaaatgaatccctatagcgtattatcctatcctaagtaaatttctatcaaagaagacaactgatcttttctctactaagagtttctgaatatatttaaagtattctaaagtaaactaaataataataatataaatggtattacaaaaataaatatttcattccgaatctcttctagaaacaacatgttctacaacatcatctgatttaatttccctataaggaatactttcaacggaatcagaatcaattgcataattatcagcttcaattaatatacctgaatcattaagatgtctcttacctgcaatttttggacaaactttcatatcatatctttctaaaaaccaaattagaaggaaaactacatgagaaccagcaattcaaaccaatattaattcctgtaacctttcttaaatctaggtgcttctctaacatcatattgtaatgggatagaaaatgcatttattccatatgatagtgcttgaatccaactcaaaacaattgcctttcttttcaacattatccctacataaagttgcaacccaagtataataaacttgtgcaagacctgataaaaatggttgttctaagaaaaatgctgcaattaatacattatttggtacattccaaataattaaaacaatacatgaaaaatatgctgttatcataactatatgcattggaataactttaccataatattgacataatggtgaaatgaaaattgcacatggtataccaatacaatacatataagaatcccatgttgtaacttgttcaacagtatataattctggttttgtttgcatataaagttttgcaccatttgcataccaaccaatatgatgtaagacccataatgctgatgcaagataaacttgccaagtagtgacagtttccttaagtgatgcccaagtaaattgttttggaattgcaactttattctccagtctctttcttgcaaaaatcatatcatcttcactgaaaactgtaaaattcttacatgatgatggaatacctgggaataagaagaaaccataaagaaaaataccaaatgtaataactccatcaatgataaattgccatctccaaccagctaatcccataacaccgttcaaacttttcctagcttgtgattgtaatgcacctgcacttgcactaccagcagttgcaaatgcaccatatacaccagctcttttaaataattcctcctcagtgagataacttgataaaataacataagtacaaggaaatgaacatgcttcgaaaacaccaacaaagaatctaattgcatacatttgtccagcactaggtaacataggcattagctaaagtcatcataccccaatgctaattcacagaataatagcaaatgtctagagaaatgaggtttagtaatcaacaaggtgattggaatttgaaataatgcataaccaacagtataacaagtattaaaataattcaattcattaccatgaagattcaaatcagttttcaaaccggaaacataagctgaaccaacattagaattatccaaatactttgtataaaatgatgcacagaggaagaataaaatagttgcatcgaatttcatgagaaacttacgttcatatggactataatgttttggataccaatcaaatgctttgaaggaagttatacttatcatattttgaagtcttctttgctcttctatccctatcaattgttggatcattgtattcagttttaaaagattcaggtttatcaattttgaaaaaatgccagatagtttgtgaaactttactttctttccaactcatgtttggtttggttggtttggtttggtttggtttcttaactcaaataagaatatgttttctgatcagttagatttctttttatactcattataccaatgtgattattcaaataaatgaactatggcaataaaatgtggtatccatttcatacatagatcaacgtttacgagccaccactatttttacaaaatcaaatgaaaaatttatcattactaacactaattctgcgatgagttaccacccttttttttctgatgatctttaaatgccgccacggtaaggctttacgataagaaaagataaggaaatttaaattaatacacaccaatagtgatatacttggcaaactgtggtttaaacgagaaaataggttaattttagatattttgttaaattgttaagttaaataaataagttataaaaaaagttaattaaataaattaaaagttaatttaggcatcccatttcttcaatggcaaacctaaagtttctctttgagattttgattccggatcaaaatatggaacttcagctaatgaagtaactctagtaccgtgtcttggactcttaccttcatgatcccaaacatttctgtgttgagaaactctgttatcccagatagcagatgtaccgtagcctgacttagtattagtccatttaaatctaacttgaatatctgcatttttttcataaatgtcaaacaagaagtttaaaattaaatcactttcaattggagagacaccaagaatacgtttagtcatacctctattaacaaataaagaatttccaaccagttgctggatgagttctaactaatggatgaactctttcaactttttttcggacctcctaatggatcattttctatcaaggtaagcatcagcagaaacatagattgctttcttaccatctaaaaatttcttaaattcatcacttaatttatcataagctgcataacctgaagaccacattagtatcacctccaacacctggaattgaatctaaatgtaaatgagtataacctgcatggttgtctttcatgaactaaatcatgtatgccaaccttgattaccataagccttaatatctaacactatcccaatttgcaaaatttgcattactataattaagatctaatcctttacttaaaccataatcaacccaaataacagttgcaccctggtaatcctgtaacatgaggaacttgtggatgtttttcaacattaccataataatcaccaagttccatattgtgccgtttggtgataatttttgatctctaaagaaaacaacgactctttcagcaataagtaatgctaattcagtccttttgttgatctgttaaatcctctaattgtaacccgacaatttcagtaccaaccttatcagttaaatgaataacttccttagctgcaccaaataatgcctttcttttcaggatcagcttgagaacctctatcaataaatggaacatcagtaatctctaatggcatgtgcttcatcaacgaaaattggaatttcatccctatttggtacctctgggtaaccttttgataaatcaattccaccatcttcaagtctctttctacttgattcaggtaataattttaaaccatcttgttcatcattaacaattgattttcttgatcttgaaatacttaaatctttatgatttctaattaattgttcaatttgtttatcaattggtaaatcattaacaatatccaatgattgcttattaactgtttcagtattactcatagtgtttgtttagatagagaaattcaaaagagaatatccagtaggggatttatctggatatttatatagcaaaatgttggattattaatacaatttatcacacaaatgttcgaccatccacagttgaagccacactggaaatttcaaacatttcacagaatcgtaagattataaaggtgttatacacaacaagatagtattttaaaaactaaagtcatcacagagaacaatattaatatatagacaccgacagttgctttgtcttgcatgatgatagataacttccatacagagcaagccccaatttcggaagttgccatagaattgactttaaggaacgagatgagacgcaactttttctttgatttccagtaagcaccgccaccaagcggctgatgtctatgtaagtttattatttctctttataattgacatccaatttgaacgataaactatataaagttcaacaattgataagaaattaacacctaatgctaaacctatccataatccataaacttgtaaattaaaatggaaacctaataagatttccaatggaacaccaataatataataagataaaattgataaaattgaaccaatttgttgtctaccttgaccccgtaaaattgctgcacaaagtatattaaaacaatctaagaattgattaattgcaattataattgctaattttgatacaatttctaaaattttttcatcatttgtaaataaagaagctaatttaattcttaataagaaaaaccaagtaaaattaaaaattgataatgaaatcattaaaatatagatagctttcattgcaggtttataattagatgatcttgcaccaattaaattagcaatatgagttgaacaacaaatacctattgcataaggaggttgaaatgctaatgaagctaaagttgaaacaatactttgagcagctaattgatccttagaaaatgtagttgacatgaaagtaataacttgaaatgctaatgcttcagataaaatcattaaaatacctggtaatcctaatttaaagaaaatgaaagatgatgaaatatatgatttaaaatgttttgattttaagtactcaaatgatggtaaacattgatatccatcaataaaatacatataagagactaaacaaatagtcattatccaataagtaattgcgaatgagattgcaggaatttgaattggttcaattagggatgaattatttgagaataaatgagaaaacatctggatttttcgataaatataaatttaatgagaatgaaattggtataccaattataacaatacgagtgggtattgaaaatttacattgagattgtaaaaatcttttagttgattcgaaaaataacaattgcaggtgtaataaatgagaaagttttcaaaaatgaatgacataatttagctaattgaatattatcatcaagtattatttgaatttgaattgataatgatgtaatatatttaaagaatgaataagaattgaaaccaaaataaacatgaaggtatcagacaaattgacaatatgattgtacattgaatataataaagaccaactttatgataatgtcttgccccataagcagttgaacaaagagtatctaaagcagaagcaaaaccattaacaataacaggaccagttaaataaaaagtcgtaattgataaagtacaagcagataattctattgaacctaatttacttgcaaaataagttggtattaaaatttgaattaaatattgaatgaaaaaagttaagaaaactgggaaagcatttttaattaaataatataattcatgataagttgaagttgaaactggatgtaaaggaaaataagaatcaattaaatcatttgtgtcattatcattattattattattattatcaatatcagattctctaatatcagtaaatcttgtatttgaacaatccgtaggtaataaaggttgtaattcaggatcaacttgagacattatttcacttaaaggagttggttcaggggatacttcttttaactgtgccaagggtacaatcatatcatgtatacgaaattaagaattgataagaaataaattagaatatacaataaaattttcaaaaaaataaattaaagtatattttaaatcagtatcaacctgacataataatagtcattttgaaaattacgtaatcttagaaagaaaaaaacattatcattacgtaaagcagaagccacacaatgacaattacgtaataagataaaaaagcggcagataaacagaatattaaaattaaaattaaaataaacaataagaattagtaatcagtgaatatacggagcgggaagtaaataaataaaataaaataataacaataataaaataataaaataataaaataaaataacttccgctccgctcttccctaataataaagacagacaaacgaggctgaaattgaacaaaaatttgcttaactgagccttatcgtttaaagggttccttactctaaattgatgttatatagagattctcgtatagattatttttatcacttttctattgttttattattgttactattattatattatgataaccatcagcgtatagttaattcactgtagatgataatagtagtaagttcccttaggtaagtaaccttaggtatttactagtagatgtaacattagatttagtatctagattagtactgttactaaaattttacaccaatacagtaatttcttatttataatcaatcaatcaattattaaaccttatttccatttctttttcctatattaaaactaccataaaatggaaataagaaatgtttaattcagtcaataatggagttaggtgatagttggggttaaaaccgtcaaaatcgcggattcattttttttgttttcctttttttatttatttattccgctgtatttctattatttcgtaaaattggttaaaaggtagaccaggtcccacatttttaataattttttttaaagttttgaaattatattattattattattattattcattcattctctttaaataactaattatggagtcaatatctgttggtaaaggctctgatgaagcttcctctggaggaattgcttcttatactggttttgatgaaacaactgataaacagattagaaatttagcaagagaatttacaagatcaagtattgttaatgataatgataattcaaatgaagatactatgaattctaatgatgatgaaaaattatctggtgttgataatttagatttcgaacaaaatccaaatgatcaacatgattcaagatttcaattattacgtacaatgacttcaatgtctcaaattcctggtgttgttccagtatctgataattcaattaatcctaaattagatccaaatagtgatgactttgattctaaattttgggttaaaaatatgagaaaaatcttagataatgatccagaatattataaaccaacttcattaggttttgcttgtaaaaatttaattgcaaaaggtatctcatctgatgctgattatcaatctaatttcttaaatttcccttttaaaattgcaagagatttatatatggatcatgttagaggtaatgatcaatcaagatattttgaaattttaaaatcaatggatgtcttaattaaacctggtactttaactgttgttttaggtagacctggtgctggttgttcaactttcttaaaaactgttgctgctcaaacttatggttttaaagttgatgaatcttcaactattagttatgatggtttaactcctcaagaaattcaaaaacattatcgtggtgaagttgttttctccgctgaaatggataatcatttccctcatttaactgtcggtgaaactttaaactttactgctcgtatgagaactcctgaaaatagattccctggtatcagtagatcagaatatgctgatcatatggcaaaagtatgtattcaaaaatttaattacaaatcaatttttttttcaattttaaaaagcattatactaacatttatttcttaatttttttcattataggtttatatggcaacttatggtttatcacataccgttaatactaaagttggtaatgattatattagaggtgtctctggtggtgaaagaaagagagtttctattgctgaagcttcactttgtggtgctaatatcgaatgttgggataatgcaactagaggtttagatgctgcaactgcattagaattcgttagagctttaagaacttctgctcatgtcttagaatcaactccattaattgcaatttatcaatgttctcaagatgcttatgatttatttgataatgttgttgtcttatatcaaggtcatcaaatttattttggtcctggtaataaggcaaaagcattctttgaaaatatgggttatgaatgtccagatcgtcaaacaactgctgatttcttaacttctgttacttcaccagctgaaagaattgcaaagaaaggttgggaagataaagttccaaaaactcctcaagaatttgaaacttattggaaaaattcacctgaatataaacaattaatcaatgatattgatgattatttagaaaaaacatcaagtaataatacaaaggaaatttatgctgaagctcataaaactaaacaagctaaacatgcaagaccttcttcttcattccgtgtctcttatggtatgcaaattaaattaatctctttaagaaattattggagagttaagggtgatccttcagttatgatgttctcagttattgctaatattattatgggtttgattatttcatcattattctataatttggaatcaaatactgctactttctattaccgttctgctgctatgttttttgccgttttattcaatgctttctcatcattattggaagttatgtcattatttgaagctagaccaattgttgaaaaacataaaaaatttgcactttatcacccttcagctgatgcactttcgtcaattttaactgaaattcctgcaaaattatgtacatgtcttggtttcaacttaatttattattttatggttaattttagaagagaacctggtagatttttcttctttttattaatgaatttcttagcaactttggttatgtcacatattttccgttcaattggttcatgtttctcaacattatcagaatctatgcctcctgcaactattttcttaactgctatggttatttataccggttttgctttacctgttccttcaatgcatggttggtcaagatggattaattatttagatcctgtggcatatatttttgaatctttaatgacaaatgaatttgatggtagaacttttgaatgttcacaatttattcctggttatccagatgttggtattgaaaataaagtttgtaatgcagtttctgcaattcctggtatggattatgttaatggtactgattatattttatcatcatatggttataaaaatactcataaatggagaaattttggtattacaattggttttacacttttcttccttgcagtttatttattccttgttgaaattaataaaggtgcaatgcaaaagggtgaaattattttattccaacaatcaactttgagaaaaatgaagaaagagaaaaacattgcatcagttactgatattgaaaatggtgactcaaaggaaaagcctgccggtgtctatgatcatggtaatgaagaaactattggtgatggtgttaataatttagcagcaggtgatgatattttccattggagagatgtttgttatgaaattcaaattaaggatgaaactagacgtattttaaatcatgttgatggttgggttaaaccaggtactttaactgcattaatgggtgcatctggtgcaggtaaaactactttattagatgttttagcaaatcgtgttactatgggtgttgtttcaggttcaatgtttgttaatggtagattaagagatcaatcatttcaaagatcaactggttatgttcagcaacaagatttacatttacaaacttcaactgttagagaagctttaagattttcagcttatttaagacaaccaagatctgttacaaagcaagaaaaggatgaatatgttgaaaatattattgatattttagaaatgcgtccatatgctgatgcaattgtcggtgttgcaggtgaaggtttaaatgttgaacaacgtaaaagattaacaattggtgttgaattagctgcaaaaccaaaattattattattcttagatgaaccaacttctggtttagattctcaaactgcttggtcaatttgtcaattaatgcgtaaacttgcagatcatggtcaagcaattttatgtacaattcatcaaccatcagcaattttattaaaagaatttgatagattattattccttgcaaaaggtggtcgtacagtttattttggtgatttaggtgaaaattgtaatacattaattaattattttgaatctcatggttcaggaaaatgtccacctgatgcaaatccagcagaatggatgttacatgttattggtgcagctcctggttctcatgcaaatcaagattatcatgaagtttggatggcatctgatgaaagaagagcagttaatgaagaactagaggaaatggaagttgaattattgaaaaaatcagttgatgaatcagaagaagcaaagagaagttttgcatcaacttattataatcaatatatctatgttacaaaacgtgttttacaacaatattggagaactccaaaatacatttggtcaaaaattgtttagcagttgcaaattctattttcaatggtttttcattctttaaagcaggtacttcattacaaggtttacaaaatcaaatgttgtcaacttttatgttatctgttatgttgaatactttagttgaacaattattaccattatatattacacaacgttcactttatgaagttagagaaagaccttcaaagactttctcatggtggattttcctttcagcaattttcactgctgaaattccttggaatattctttgtggtacattatcatatttctgttggtattatccaattggtttctatacaaatgcagaatatacagatacagttcatgaaagaggtgcattatcatggttattaattgttggtttctttaattatgcatcatcattaggtttagcttgtgttgcaggtgttgaagaagaacaaaatggtgcaaatatttccaatttattatttacctatgtgtttgaatttctgtggtattttgaaatatccaaccggtttctggtcatttatgtatcgggcaaatcctttcacttactggattgcctcattattatctgcaggtgttggtgatagtaaattaatttgttcaccaaaggaagttgtttattttagaccaccatcaggtatgtcatgtacagaatatattacaccttatatgaatcaaacaggtggctatatggttgatagtgaagatcctgaatattgtggttattgtacagcaagtaatacaaatgcatatttagaatctgttcatgttagttatcataaacgttggagagattggggtattttcatttgtttcattgctattaatataatgtttatgtatgcattatattggttagcaagagttccaaagaagaataatcgtgttaaggatgcatctgctttaaagagtgaagataaaaaacttgaaactcaagctactgaatctagaacaatcgaacaagtttaaactaaaatcttttctttgataccatttttttaaaaaaaacactatatgaagtattccgattgatactatcatttaatcatccattcccttgaatttttaatacaaatttgttagtaatcttttttttacataatttttttataatttaaataacttaataatatcattactataatataatctataaaaaaagataatttttcagttaaactttacacgtttaacattttcattctcaacgggttctggagttgattcatctttcaattcaataccattagtcaaattaacaaatttattccaaacatggttaattttatcaatatcatacaagtttttattattattcataattttccaaatttctaaataacctaatttagcaatataattaattaaaggattgttatttgctttaattgaattatttgccaaaaatgcatatttacaagctgatgtaaaataaccaacttttttattaagattatttaattctttcagacctgcatcatatttatatgaataacccttgattaaataaataagtgatgtaagaaatggagttatctgtgaaattttatcaattgataaattattgatgaattcagttgatgattttgaacttgtatagaaaaaatttattgttgatattgttgattttatcaataattcatttaattgatcatcattaaatgttcctatattagggatgttttcttctaatttaaataagtcttgaaataacgagtcttttagtttgagtaatgatttgaatcttttcatcgatttatcataggatacatcgaattctgataattcattatttttcaatttttcaagttctataatatgtgataataatggaattgtattcaatgtagtgataaggtataattgttggttatttattaaagagtgaaaatttttgttgaatggattaactaatcctattttattctggattgtgaattgttgaaatgtttttgtatcatcaattgtattattaagaaaatttgttcttatttgaatatagtattttaaagatttatagtgttcaccatttctttgataaatcattgcaaatatcaagtatagtaagggtattatgttattgtatattataatttcataatctgagtatttaccagtactatagttttccatgaatttgctgatttctttatatctttcattttttaacagttgttcaatagtggggtaatcatctttgataatatcagagaagagttggtaaacggatagaaatatttttgtataattagttcttataatttgagtctctgaactgaaaattgtggaagagttagatgatgaagatacagatacatcatttaatagattgtttgttaaagtaaataatttatcacttttatttttattatcccaagatttataagaataacatattgataagtaaaagtatgaaatcatgttgaattctttaaatgtaagccaattcaattcgaaggggaatgctagattgtgtttaactgtgaaattgaaagacaattttgatgatgtccctagaagtttattatttttagggttggaattgttaagtttgatgtttttgataaatttcgataaattttgtgcaatttcattgactttattaaatttatagtgtttaatatttattataatttcaaataatataatcattgttttgagttgtaatgaaatagttgaagatttattggaatgactatcttgtaatgattgaattttggttaatgtttttagtaaggtttctaaaggttcattgttgagtaactgttgagataggatattcactagtattaattgattaaaatatgttaattctgatagtgaaggggtggaagatagggttgagttttctattatattgtctaattgtaaatgtattgaattaagatcattgaagtttttctcaaataggtacaaaacattgaagttttggaatttaatgaattggaaaaataatttaatgcacgtaaatgaatcatctgtaggtatttcatctttaataatcttattcaataatgatagaagagacatgtgagaagttgtagatatattattatttaagatttgaaaattaagatagttcaattttaatttagttattgttaattcaggtatattttcatttcttttacatatttgaataccttttgaacaataatccaatgctaaatcataactaaaagtttcattaaataatatagttgaaatcttgtaataaataattgcttgtatgtttgcatctaagacaaatagataatcagatgctagcttgaataaacagttaagagatgccttaatgagtgaattgtatgtgtctaactgtttacccgtaggcaaataacgcgttttagtattaagagaatgtgcttgtttaagataatcattactgtattttaaaagataccaaacttctttatcagaggaaagttttccaccttggtccatcttcagtgtcccaggaaaagttctttagtttaatttaacacacgttaaaaagaaacacgtataaatatataagttaccataagcagtaattcccaggaatagcggttgaagtaattttcatgccagcaaacgcgacaaaacaggtgtcgtgggggaatagactcagctgcgccgttccgcgtcgttccgcataaatagcgagggctgagctgtataaattttttttcaacaagtggcaaatagggtggcaaaagttgtgaaaattctgtttttcgtgcaactataaaaggaagcgggttcgccccttttttgcagactgcgaattctggcgatttccagtattgtgattgattattttaaagttttcataatatttggaaggctcagctgttattgtttcgtttacaacttttttcactgcttttttcttttccgtaaatcgttatttggcatcccaatactatcgaaggactcatttgcttgaacgtctttctgaaatactcttacaaactcatacttacataccattacacatattacacatataaataatggattcgcttaaattaccaacaacggctgcccgtgcaaaggttttcatgggagaaggttcattatctttcccaacttcatctgctgctccaatagataatagtaatataaagagtaataatgatatcactaataatgatataaataatcttaataataataataataataataataataataatagcaatgctgatttgaaatctataaaacaagaaattgatttaaattcaaattcaaattttaatactaaaattccagataataatttatcatcaataaattctaaacttgaaaatattgataataaaaataatattaatactgataataaagaaattactgaggctaatggtaatacagataatgataatttatcagcatcaggtattgtaccaacattacaaaatattgtcgctacagttaatttagattgtagacttgaattgaaaacaattgcattacatgcacgtaatgcagaatataatcctaaacgttttgctgcagttattatgagaattagagaaccaaagacaactgcattaattttcgcatcaggtaaaatggttgttacaggtgcaaaatctgaggatgattcaaaattagctgctagaaaatatgctagaattattcaaaaattaggatttaatgcaaaatttactgattttaaaattcaaaatattgtcggttcttgtgatgttaaattcccaattagacttgaaggtttagcttatgctcatggtactttctcatcttatgaaccagaattattcccaggtttaatttatagaatggttaaaccgaaaattgtccttttaattttcgtttcaggtaaaattgttttaactggtgcaaagcaaagagaagaaatttataaagcatttgaagcaatatatcccgtcttaagtgaattcaggaaaaattagtttcattggtggtatattttcatctccattatatttcctcttttcttatcttgtcttctcttctcttatcttatctctattactattgtcacatattccattccattactctagttgtacattatctaccattatatttcctatataagagctgtattataataaataaaaaataaaaaataaaataaaaatgaaaattaaaaacgtcccatatatcaaaaggaggtctcgaacataaaaaaaaattttatttttcattttctcaataggcttggatgatcccctataattattatttattatatagtgattcaccccccttcccacaacgccactcttgtaaaagattgtcttgcaatcagcacgcaattcttcttacacgtttataatataactagctctaatctattatttatcgtcttataggatcttaaatgactactgcatcctctcaagataaaagtcccttaagtactgttaaagttggaggttcaattctcattgatagacaatctgcatctgcatctccatcaccagttccaaatcaacaaaatatgaataataataataataatagtggtgaagttttacgtccaatctataagaaaactccatcttctaattcaaattcaagtaaactgtcacaattacctcaacttgaaactcatataaaatataatggtggtgatgtttataccaataatattaggacaaattcaaataattcattattacaaaatgataaaaaaattattaatgttaatgaatctttattaaataaggtaacatcagaaagttctcagagtgtattaattggtaaaaataatgtttatcataataatggtaatcctaatcttgtttcaactccaacaagtattttaactcctcaccccaaatctgtcccagttccagcatctatactagcatcacatggtggatcacataatgaatccgttcattccgttaatgatactcataatcaacaacaacgagattattttctgaatcataataatgatgggaatttagaaaattcaaatttacaaacaccaattcaacaacatgcaccccctgcaactccaattactgtaactccaggtttaaaatcttcttcaagtttaatatcgtttcaagtgactaatcaaaaacatagaggctcaatatctgtaaggcctgcatctaaggtaataccgggtacaggtgcaggatcaactaataataattcaacattgacttccacaccaataacttcatcagtaactacacctgtgacatcaattggaaatcatttttctggattggccattgacaatttacaaacaggtataccaagttcaagacaaccatcattatctactacaaatccagttttaccttctaatttaaattttgtatcgcctccattatcaagacacggatcaactagtgtatcgaatgattctgtaagtactccaagaaacaattcaaatggattttcagctcattcaaataattcaccaaataatccgttatcatttacaattgatccaacaactggtcataagatatcatcaccagtatattcagctgctaatatatcaagaaaggaaaatgttaaatcaccaaatcattttgatttaaatggtaataattcacttaatccaactataaatcatataattcatcatgatgataatttaattacaccaattacgcagacagtttcagggtatccattaaatagtataatgttcccagatttaccatcaactagtagtactaggaaaccttccttaacaattgaacataatgaaattaaaagtggtgtatcatcaaatggatcaactagtgaattaattactacaactactcctaatactttaaataaaaagaaaatacccaaaacagtagttgcaccatcaagtgaaccattattaccatttactgaatatttatgtaaagaggatgatgataaaattcatatattaattggagctacaggatcagttgctacaattaaaattccattaataattgataaattatttaaaatttatggtaatgataaagtatcaattcaattagttgttactagagcagcagaacattttcttagaggtttaaagataaacagtgaagtaaaaatttggagagaggaagaggaatggtcatcaaatttacataagattaaaccaggagatccaattttacatgttgaattacgtaaatgggcagatattttattaattgcaccattgagtgcaaataccttagcaaaaattgccaatggaattgctgataatttattaacaacaattgttagaatttggaatccatcagttaaaattttagttgcacctgcaatgaatacatttatgtatagtcatccaatgactaaaattcatcttaatataattaatgaagatttaaaatttattgaagttttaaaacctgttgaaaaagttttagtttgtggtgatattggtatgggaggtatgagagaatggagtgaagttgttgatattacagttaagagattaaaagagattaagaagaagaaattagaggatgaaaggatcaaaatggaagctgaaaaggctgaagaggaagttgatgaagatgaagatgaggaggatgaagatgacgatgaagatgatgaaaacgacgatgatgactatgatgatgacgatgacgacgaggatgacgatgaagatgacgacgaggatgaagaagatgatgaaaataacaataataatgataatgaacaaccattagtgtaatattaacccatttatagatcgatttatgtaataagcgtttgtaataaaatgatgacatgaaattttgatccgatggaaaatctgaacaggttttcatcacagttcttcttttttatatcaatgggattgaaagtacgtagtgtagtgtatgcattggcgacatatactatttacaccacatatagttatgcaagagctagagaggagataagtttccgagagaaagagtatagtaaacgagaaattgatgatgaagatcatagatgggatatattaaacattcatggaaggtatgagaatccatttaaagaatatagaccacagacaatttatgaatttttcataatgagagttattgaattgagtaaatttggatcaaggggtggtgttgaagatgatgttaccataaggaaggataatttaggtataaaagttaccgatgatagtattaatttttggaaatcattacgtgataaatgtaaggaaagtggattattagcatatacatggtttggacagagttgtggaattgtcaatagtagtgataaaatatttttaatggatccattgtttgaaaatagtatagttagtgaaaaatttggtccaaagagaattgtaccgtgtgttgttaatattgatgagatagttgaagatataaaaccggattacgtgttagtgagtcatgatcatccagatcatcttggtgaggggagtattagaggattatcaaaattagaaaaatgtgaatggattgtacctatgggtattagagatattttagagaataatggtattaaaagtgataaaattattgaaatgaaatggtgggataggaataagttaaatgaagaatttgaaattgtttgtttacctgcaatgcattggtctggtagaatgttatatgattcaaataaatcattatggtgtagtttcttaattttgaaaaatggtaaatcaattttctatcatgggggtgatacaggttatagtgaaggagtatttaagaggattggtgatatttatggtccaattaaatttgcagcattaccaattggacaatattgtcctgaatggcatcaagcacctagacatattagtccaagtgagagtattaaaattatgaatgagatgaaaatacataaaatggttggagttcattgggggacatttgtattaagttcagaagattatcttgaacctggacaattattaaagaaagaaagtgaaaatttagggaaaattaataatataattgtacctgttcagggtaagagtttaattatggaagagggtaagattgattttaataatgatgatttagtaaaagagacgggaaatgattttattttatacaattagggttaggtctatttaaatacatgtttgagctaatttttggaatttttcaaattcttcatcattcattggataagtatgagttgaagaatttgggaaatttaaatttttaacatcattaccataattatttaaagcatcaattgaaaggttatgaatatttaaataagggttaacaaattttggtaatttattatctaacatacctaaagcatctgacataactaaaacttgaccacttgttttattaccagcacctataccaattgttggtatatttaaattttctgttatataatgagataatttttcaggtatacattctaaaacgattaatttacaaccaatttcttgtaaatgtaatgcttgtttaaaaatttccaaagcttgaattgaatttctaccttgagctttaaaaccaccagttaggttaaatttttgaggttgtaaaccaatatgacctgtaactggtataccaaaattatttaaagttttaattctatcagttaattcatatgaaccttctaatttaattgaaccaattttacctaatttcattaatttaattgcagaatcaatacattgattaattgaagattcaaatgaaccaaatggtaaatcaacaattaaaaatttttcattaattgatctaataactgatttagttgaataataaaaatcatcaaattctaattctaaagttgaaggatgaccttttgcaaccattgctaatgaatcaccaactaaaattgcatcaatttccgatgatttatcagcaattttaccagttatataatcatgagctgtaattacagttattggagttttatttttatataatttataaatatcagataatgatgattgacgtttaggtggatgagttgaatattttcttattattgatcttattattgtcattatttattaaaagagatgtgatttaggagataaataaaatttatattcatgttggggtaaaataaaaaaaaattgacgtgacaaaatatacgacaattaatcatgtcgtatagtatcgtatattaataggagtgtaactttactttaattgatgagttataagaatatataaataaataaataattaaggagatgatgatactaacataaagggaattataatttaccctttaattcttctctagcatatcttgcaccacaataaccacaagtatgaaccttttctttatctaaattaatataaacttttggatgaccctgtacgaaatcagttccatgacaaacagctatattaccatgaataaatgaaattggttgatttttaattaattcaattgcagctaaagcttgaggttgctttgataaatctttaccaacaaatcttggatcagttttataaatttcatctcttgatctttgagatggagaccatacaccatctctatttggagcttgtttataactagaggatggaataacatcaagtggatcttcagttgttaaatctgttgtagttgatgtagtatttgatgtagtggttgatgttttagtagcagttgcagtcttagtagcagttgcaacattacgtttagagattgcccaaatggaagactttacaccaataactgatcttaacattgtatgcagtagatgaagatatagagatgatgatataaacgaatacacaaataaatacaaaccaaccaatagacagtttctattatcaattacttaatattaatatcaattacttaatattaatattaatacttagctaagagaacctcccctcaatggaagaaattttctatcttatcgacgtatcgaccaatggacgcatcgacccatcgacccctactcgacgcacagacgcaggctcagctaaacaaatttaaaatggaggatcaaatctgatattcggtttactcgttccgtaaccattgaatggactgaatctttcattagggttgtttcttttatgtctttcctctggatggaataatggatcatcaatacttggatgcatacctcctctgccaatacctggatataaatcaccatctccaaatggcataaatccttcaccacccctattatcacctcttctatttaatgagcctccaatttcatattcatcatcaaatcctggcattggatcacctccaaaattattaaatgatgatgatatagtattagtattatcttcattattattaatcctttctcttttaatattataaaattctcctttaattaaatcaattaaacttcttaattgaattatcctcttattttgataactttctgcgactcgtcgttcgagggcttggctgattgatttactaattgttagggggaaattaacattacttatatcaattaatgatgtatcaataatagttaatgatgaattaattgatttactaattaaatcttcaattgatgtataagttgtagtcattatttattgaatgtaaataaaaacggatggcaaaagagagagattttgaaaaaagaaagtgatcaactaagaaaaacggaatttttgataaaacatgtcattccattcacactataagtattttttttgtatttcctagtataataagtaagtatacttgtaagtattgataattatatcgatatattgatataatataatataatataatataatataatgacaactgctgtaccattaatatattcattccctgaattctctggagttgcagaagctgttgcagatttaattgtaactgctcaaaataaagcattaaataaatctcatgatgacattaataataataataataatagtacaacaaatttacaagattctacatcaataataatatcagataatgaaattgatcatatggattcaatttcaatgtcaaattcacaatctgtttcatctcaaataaggaaaaagaagaaagaatctaataaaaggtttaaaataagtatatccggtggttcattacttaatgttttaaatgaaggtttacttaatagagatgatattaaatgggataaatgggatatttattttgctgatgaaagattagtaccattcgattcaattgattcaaattttggtcaagcaaaattaaaattatttgataaaatacctgataaatttggtaaaccaaatatttatccaattaatcaatctttattaaatgatccacaggaatgtgctgatgattatgagaaaactttaattaaaggttttgcatcaaaagattcagttaaattaccaatgtttgaccttatattattaggttgtgctcctgatggtcatgttgcttcattattcccaaatcatgaaactttaagagaaaattatgcttggtgtgttccagttgaaaatgctccttcaggtcaaaaaaatcgtatatctttatcagtacctgttatttgtcatgctcatatggttgcattcgttgttgaaggtacaactaaagctccggtactttgtacaattatggaaagacctgataaaggtttacctgcaagtataattaatgaaaaggcagctggtagaattgcttggttcgttgatgatgatgcaatttctgatgttgtaggtattacaaagagaagatataaatttaccgctcaatcaaatcgaaattgatttataatataatatcctttatatgtatcttacttacataattatctataccgttgcatggtatatctatctgatagttatattatttataccacttaattaataataataataataataataataataataataatacacgcttaattgtataatttttttctaacccataataaaccattaactacacacttcttttctttagttatatctacaataccaaccatgtattcaataacaccattattattgacatgttcatcaattactttcataatatcattcataattttatacaaattaactaatttaaaatcaatttcattaccattgacattaactttattaatttcattatttttaccattaagtacaactttcttaattccaattgatatttcatcacctaataatagtcaattaatgtcaattttatggaaattaaattattggattacattttttgcaacttggttaattttaccattttggcaatattttttaagtaatggtcaattcgaattattaccaaaaattaaatcatcaatttattcagttttcaaatttttattaatactgattataattggtattgtcattttcatttatatgttattttatcatattgaatatattaattttacattcttaaaatctttagttataacattatctcatatttatgcattaacaatggcaatttggttaatgattcatggtttgattcatttacctaaaagttcttatttaaaatcttcatattctaaaactttagataattcatatttgaaaattagagattatcaattaaaacttgaagattcaaaatttgaattaaaagatatttgtataaagattaattcattacacgatttaattaataattcaaattttaatataaatttagatattcaattacgtgacggtataatttatatgtttaatcatatacctgaaaatttcaaattaattaataacaatattaataataatcaacaatttcttattgattcaattggtatatcaattgataaaattacattaaattttattacaaaattaaatgaagatttaaaatggaaaatttgggaatataatcattcaaattctcaatttaatgaacaattaaaggaaattttatattatgaagatattatcaattatattaatttatcaaattttgaaagtgaatggagaaattttaattataaatggccaaaatttatgtttcaatatgtatggccattatattatttgataattacatttttatttacattaattagtttaataattattgaaagtgaaatgtttcatggaactaaattatcaatacttaattggattataaatttaaattctaaattttcatatattttaatggttatatttttaattataatgatgtcatgttcaatgaaaagtttaagtttaattaagttattcaatatttataaagttgaatttaattcaaattcagatcctgttagttcaattttctttattagttatgcacttagattaacaattccattaggttataatttcttaatgttattaaatcctcaaatttcagaaaattcatcattctcattattcgttactggtaatttacatttaattaaaattggtgaaattttaaataatgtaataccaagattagttttaatacctgtattattaagtgtatttggtatttgggggaaattaagaaaatggttagatggttaccttttctttgattatattttggatgaaattgaattatatgaagaaaatgagacaattgatacaaatttaagattaattaatgaaggtaaattaattgcacaatcaagttttcaaagaaatttaataccattaaatgatacaacaatgccaaatttttcatttaatcaatcatcaaattttagtatttggaattatttaccattttcacttttcaaaaatagaaacaataataatggttttaatatcgatgatgatgatgatgataataatattatgaatggattaagagaatataatttaattaatgaaaatggtatattattagagagtagaagaaatagttcaaatagtgatggtggtagttcatatagtggagtttcaggtaattatgatattgataatagagttatgggtgatgaatttattagaaatattcgtgagtagtttaaaattgttgttatatgtgataccctgtagattttttatattttgttatgtatttatgtataataagtatgtgattgaaagttattgaagtgattgtgttgatgattttttacttattttttaaaaaatgtgaaaaaattttgaatttttgaccatattttttaatttttacaaatcattggtaataatcaggatgaaggtgttttaacaaattattaaattaccataacttgcaatttctaataaattttctaataaattttaaaaactttaaaaatcacgtgacccaataacaaaaccacaggactaacaaacaggtttaaaaaacaactgaatggggctatggctcaatggtagagctttcgactccaaatcgaaaggttgcaggttcgattcctgttggcctcaattcaacatatttttttatcaccctattaaaaatttaagagaggttaatatttattttactactattacggagattgtggaatttttattattattctactccagattactttttgaattgattgtaaactatatccacaaagcaattgattatcaagatagcaacccgaaaatagtcattgatataacttagactattatatattcattcattttatttagttaatagacatacagacaagtagacatagactattgtcgtatagatcagcatatgatgatgaagatgaaaataaaattaaatacaaaccttatatgtaaaaggtcaatatcacaacatttaacgattcatgcaatgaaattgaaatctccaattaatttccatgttgatttacttaaagtaccgtcaaattttggatattatacaagtagagttaatagaatgtataatgaagatcgatggcaaacatcaatattagatttgaaacctgatgaattgattaataaaaaaagtacattaaataatgataaattaattgaagaaacaaatagggttaaagaaccaaaatatacagcaaattcaccaccaattgatagaacaatttttgcatttggagttttcgatggtcatggtggtgatgaatgttcaagttatttgaaaaatcatttgtatgaaaatattgaaaatttatgtattaatgaagatactatattaaaattaaaagatttttataaattgaaaatcagtggttattggaaacgatgggggaggagaattggtgatgttatggttagtgaatgtaaaattgagaataaagttaaattatttattgatgaagttaatgaaaaacacggtatagtgaagaaagtagataatacagtagatgaaatagatcatgatcatgataatgatgatgataatgaaaatgaaatggatgaaaaatttattgaatgggatgattttagtaatggtaaaaaattatggttagtacttaatatgatgataaatgaaaaaaaactgacacattgggaaatttttaaaatcaggatatggctaggatatttatttacagattatcaatttttaacatttgaaaatgcacaaaatgaattaagattaagtaagaataaaagtaaagatattgaagatatcaagagaaaaataattcatagtggtagtacatgtacatcatttttcacatatccacttaaatggaaaaatgataataataatagatatttttatcaagataatgtattatcaagattagttgttgcacatgttggagatacacgtgcaattatttgtgataaagatggattagctcacagtttaacaaaagatcatcatccatcaaatcctatcgaatcaagtagattaagaaaattaagtgcaggattaattatgacagattcgtttggtgaagaaagatttttaaattttgcaaatacaagatcatttggtgatatcagtgctaaaaatgttggaattacaagtgaacctgaaatcagtgaatatttaattggtaatagtacaatgattgaagaatttaaaaatgatgaaaataattttgaaattataaataataatgaaattaaagattttggaggtgatgaaggatttattgtattaattagtgatggaattacaaataatttatcagatcaagaaattgttgatttaattatgatgaattttaataataaaggtaataataagggtaatccaatgaatggatcaagggaagttgttgaatttgttcaatgcattaatggtgatgataatgcaacatgtttagtaattagattaaatggatggggtaaatggccaattaatgatcgtacaggtaaattaagagaggaaagaatgatggatgcaggatataaatcttttgataggtaaccaaataagagatattatattgtgattattattttatttttatgtacaaatttaatatacaggtacttttttatttatttttgtaatagacttttataatatataccagagaaaatgaatgaaacgaaataaagtgaacttacaagaattccactatttattcttagtttgagtataagaccatctttttctagtatgagcaaactcaccaagctttgaacctaccatattttcagttatttgaacttgaacataatctctaccattatgaatttgaaattttaaaccgacaaattgtggtaaaattgtacaagatcttgcattggttctgattggagtaccatcctttttagcctgtgcaataggaagaggaacaacaaatggacctttccaagaggatctacctaatgatacaagtgaagctctcattgtccccaaagaaagaaagattgttcaatgataaatcgataagtgaaaaatataaatacgtcaaaattattttttctacgtttttcagaaatcttcttcaactttgtcttctaagtttacaacttccttttcaactttgtccccggaagtgcttatccgctcaattttttgagtacacaataattggacgaagtatgatgtgttgtttattaaaaattagcagataaccatggaagataatcacgtagaacccacatacaatcaactggatttctatccatctgaaagggctgaatattgcagaaagtacaaaatcaagggcggtaattcaatgtttgatatatacaatggtgaagtcaaagccgaatttaaatactgtctgagtattggttcatgttccattttccccagatatcaagattcatcattcagatatgatctttatatgacgtttttgaataaacgttttaaagtatatacggatgcaccattaattttttatatatttcacaaggaagacagattgacttttattcaagctgcttggattaatgatattgattactccaaattgaatgataggaaacttgtttgggattcatttgtgtttttcaaacaacctataaatccaatatttttccgggataggtattatcaaacaagacttatcgaatcaaataaaacgttcactgtgttgacatatgcacaatttcaacaagtttacggattcatggaaaaatatgtgcaaaaaccaggtacgagttggagaaaattagagaaagtatcaaaatcagaaatttattatactagaatgtattgtaagttttgtgatggaagaagtgtatttatattacatgattgtttccatgaattggtgtttctgaaatttgaaggtagtcatcataatgaatgcttagaaaagaatattcaaaactgctacaaagcttatagaaacttgttcattaatgatactagtactgacagcatgacgattgaaaattatattaaaaccacatatgccaattgttactcaactatttctaaatgtggtattcttccaagtagtgctactctatgtcaatggaagcagagatattattcattgaaaaagaatggaattgattcttataagaaatcagatattggtgattactataaatgtgcagaactcatgatagaagcattgaataaaaatgaaatattaactaaacgtaaaaattcatacataagtgttcccaaaagtgacgggcaattagttcatcacttcaattacgatgatggcttgccgggttttatctttgcatctgagatatctcttttccatttatcaaatgcagaaagtataacttgtgatgcaaagtcacatttacttgaacaaggtaaagttagattcatcaagattaattttgagcaatttttacatggtggaactgatggaagattatttttagggtgtatcgcaacattaccacatgctgagaaagctgttcattatcagaaattctttaatgagttgaagaattttcttcataatacctttaatactagtttccaatgtaataccgtcttaactgatgattcaaaagcgcaagctgctggtgctactgaagtcttaggaaaccaagctaaaattagaacacacccttgcaatatacgtttaacctttgaagcaaaccataatggaaccatagttaatttattaatggatgcgatgtattcaatcagtgaagaaatgtgtatacattaccttcttaaagcgatggaatggtactataacttaagagaagaatttaataaacatccacaacaggatatgagatgggtaagtgtagatatgaagaagatggataaatttgagattattaagggttttaatgtaccagcatttttaaaatggaaaatgatgcaactgaatgatatttacaaaagtagatcacagtggagtttgtttgccgtatttgatgatgataatgcaaacccgttatctagttttggaatagaaatgatcttatttggtgatcttgaaagtatgaagaagaaatttcagtattatttgaaaatggtgagtgatgttagtgtgaatgatgttgaactgacaccaataaagttacttgcatcaaatgtacagtttgaaagtgaattaactgatgaagaagttaaaaatgcagttattaaaatcaaagatttctataaaatttatgggaatagacttatagaaggtttacgaattgataatttgactaatattgttgagttctctgattccattgtgacattttttgcaaaacatgatagaagatgggatcaccatccaatgaaattagagattagtcgggatcttcaaaagatggagtttgctaagtatcttccagaatacaaaaagatgatgttaaatgatgagtttattgaggtgtattcccaaatacatgatcttgaaccttttactgattcagaggatttaatttcttgtgagtattgtttacagtgttgtgttgctcgtataccttgttcacatgtaataggtgggtatctttatgattacagggaagagtttggagatgttaattttaagaactttgttaggaaattagatgatattttaataaagaaattttgtcctgatctttaccagagaaagtcgagaacacgcaatgaaagagatgatgatatagtgaatgtgaaaagaataaagttagactaatagtttatgcattttatattatttaatttttatatacagatttaatatacaggtaaagtttctctttgattttttcaacgaatctatttatttttagtttgagtataagaccatctttttctagtatgagcaaactcaccaagttttgaacctaccatattttcagtaatttgaacttgaacataatctctaccattatgaatttggaacttcaagccgacaaattgtggtaaaatggtacaagatcttgcattagttctgattggagtaccatcctttttagcctgtgcaataggaagaggaacaacaaatggacctttccaagaggatctaccaaatgatacaagtgaagctctcattgtcttcaagaagaaatgaagttccttaatgcattcaattcatcgattcaaaattcatgtagttggagaaattgtaaatttttcaaagagtgggtaaaaagaccgacgcaccgaccgctacatgataacttatcgataatatccttattattaagggattaagtgttttaagggtatatattattcttttatgtattgttatgatatagtagtgcacgatgtttcatttagcacaatcattatatgatcaatggacacgtcaagaggaatattctgtattaattttaggattagataatgcaggtaaaactacattacttgaagaattaaagagtaaatatttaaataattattctaaattaccatcatcaaggataataccaacagttggacaaaatgtttcaacaattcaaattggtaaaattaaattaaaattttgggatattggaggtcaagatgcattaagggatatgtgggatgaatattatttacaatgtcatgcaattttatttttaattgattcatgtgataaggatagattaaatgaatgtagtgaaactttgaaaaatgttatatctgatgataaaactgaaggtttaccaattttaatgttagcaaataaacaagatttacaaattgaaactaaaatggatgttgcagaaattaaggaagttttcaataaaattgcagttaatttaaatgcaagtgattcaactgtacgacctattagtgcaattactggtgaaggtgttgacgaagcaattgattggataaaggatagagttatacttaataagaataatagacctccaatattacgtaagtgagtgaattttttatattaataatattaatagtgtaattgtaaggtatgataatgaataaaccgatatgttctttcttttagggtataatgttttctcgtataataagggtaccgttattaaaacagtttggtagtagaagtttatttattcaaacattaacaacacctaatgaaaatgcattaagatttgtaccaaatggagcaacaattttaccaagtcaaaaaactccaacagttgaaattaataatattaaggaagcaattcataaaagtgaacttgcaatgaaattattatcattaaatgataaagcaatatcatcaattttatttggatatgattttataacagttgttaaatattcagaggataatgaagtcaaaaataaggctgattcagttaaaccacaatcatggtcagttttaaaacctcaaatttttgcattattaactgaacatttaacaatgggcggtagtgtattatcaccagaatatttccaacatttacaaaaaatagataatgaagaaattgtaatgaatgaaaataatgaaagtgatgatgaatttgataaagatttaacacctgaggaagaagttgttttattaattaaagaattattaacaactagaattcaacctgcaattcaagaagatggaggtgatattaaatttattaaatttgatcatgaacaagggattgtttatcttaaattaattggtgcatgtaaatcatgttcaagtagtgaaattacattaaaatcaggtattgaagatatgttaaaatattatattgatgaagttaaatctgttcaacaagtattagatggagatgctaatgatattgataacgttaatgaagatgttataaatgaagaaaaaaaatcatttattaaacatacagttgatgaattaccaccaagtttataataatctttatataaaacgtgtaaatagtgatatgaatacatttttttgataataataatgacttaatacgagctagtatacaaatccataaaaataatgaaagatgaatataaatagaaagaaaaagagagagtatgaaaaaggaaagatattaataaaatacagattgataataaaacagtgataatgataataataataattgaagatataatacaacaagattatattttcttaaattctatttctttgcctttgcctttgatttggtagctttagttgacttagcagttgattttgccttagtagttttagtagctttagtaggtgcctttgattttgcacttgcctttgcctttgcctttgttggagttttagtagttgcctttgatttagttgatttagcctttgaaggagcagcagcctttgctttctttggagctttagttgaagcctttgcttttgttttagttgctttctttgcagtagtttcctttttagtagttgttgaggaagcagattttttaacaggttttgatactttagtaattttagttgatgatttctttgttgaaggttttttatcagcttttttagaatttaaagatttttcctttttcattactaattttaaagcatctttattaattttaacaggacctacaggaccttttggttgaataaataaatctgagattacacctttccttaaagctaaattaaatgcagattcaaaaccattatttaaattataatttgattgaatgaattttttaattgattgacgagatgaaccatttctttcctttaaagtaatgattgctttaacaatcatatctttataacttaatttatttgatgtatttgtagttgacatttgttaattgatgagttaataaataattataatttttttttctaaaaaataattgaaattaattaaacaaatgaaaacaaaagaaaaagaatatgaaacaagtggaaaagaaagtcaaaattgaaagaagtaaacaacatttggaaaaatgatgataaaaatgataaaaatgtaatgtaaacaatgcaatctcttatattaattaaaccccgtatattaaaataagaataaagaacgcgtttattacgtaaacatttacccgtgtttgcattacgtaatgcatgtcacgtgctattacataatcacataatagacgcgtcttttatttcaagcattataatattttaattactcaaaatagataaagtatccatccacccccactccccccactctctcatattaatatattattatgcctactagaggaaatcattaccataaagtttatattcttagatttattattttattaaatctctattgtatatatcacatacgagaacattctatctcgtatcttgtagtgtatatcttatacaacacaaacacaaagacaatacaataacatacaatacaatatagtatagtatacggataagtcccgtcgcaggtattataataataattaccacaggaagataagaatctgattggtgggtagctgctcaattaagtttctcttatcgggccgcacatggcctaaaagggtaattctcagaattattggaccgttttctcactattcggcgttctttgacacattttccactatcttcattaaagtataaatcctttatttttcaccagtctttccttttgatttaaattgattcaactttcctagtttctctttttttctatttcaacctctcagggtttctctttatatttcatttattttactttatcttcttatcttttatctttcttttcatttcttattatcaacaacaaaaaatttttaattaaaatggtccaaccacaagaacctgaatttcaacaagcttataatgaacttttatcaactttaaaagattcaactcttttctcaaaacatccagaatatgaaaaagttatcccagttgtctctgttcctgaaagaattattcaattcagagttacttgggaagatgataatggtgttatgcaagttaataatggttacagagttcaatttaattctgctttaggtccttataaaggtggtttaagacttcacccttcagttaatttatctattttaaaattcttaggttatgaacaaatctttaagaatgctttaactggtttaccaatgggtggtggtaaaggtggttcagattttaatccaaagggtagatctgataatgaaattagaagattttgtgttgcattcatgagacaattatcaagatatattggtcaatttactgatgttccagctggtgatattggtaccggtggtagagaaattggttttatgtttggtgcttacaaggcaatgcaaaatcaatgggaaggtgttttaactggtaaaggtttatcatggggtggttcattaattagacctgaagcaactggttatggtgttatttattatgttgaaaaaatgattgaaaaggcaactaatggtaaagaatcattccaaggtaaaagagttgcaatttcaggttctggtaatgttgcacaatatgctgcattaaaggcaattgaattaggtgcaacagttgtttcattatctgattcaaagggtacaattattaatcaaaaaggtatttcaccaaatcaaattttagcaattcaatctgctaaattacaatttaaatcattagaagaaattatttcaacttcagaaacttttacaactaattcaactaaatgtgaatatttaccaggtgcaagaccttggattcatgttggtgcaattgatattgcattaccatgtgcaactcaaaatgaggtttcaggtgatgaagcaaaggcattagttgcagcaggttgtaaatttttagctgaaggttcaaatatgggttcaactcaagaagcaattgatatttttgaagctgaaagaaaatcatcttcaaatattggttcatcaatttggtatgctccaggtaaagcagcaaattgtggtggtgtcgcagtctctggtttagaaatggcacaaaattctcaaagagaaagttggacagctgaagaagttgatggtaaattaaaggatattatgattaattgttttaataattgttatgaaacttcagtttcttattcatctgaatcaaatgataattcattaccttcattagttatgggtgctaatgttgccggtttcattaaagttgcagatgcaatgaaagatcaaggtgattggtggtaaatcatatataattgattctttaatcctattttataatctttataacattaacattacatgtacaatttaaagtaatgaactaaaattatttattacgtaatagcacgtgatcgacgcatagtctttatatcctcaattttatgattcgtatagatttgtacctctttattacgtaataaatgataaattctacaattaaatattaattccgtaacaagttgatgattttgatgattttgatgattttgatggttggatgggttggtattatgttctttttgtttttgctttttagttatatttataacaatcaattatgtctgcggctacttggacatcatttattaaatctattgcttcatataatggtgatttatcttcattaactgcgccaccttttatcctttcatcttcttcattaacagaattttcacaatattggtcagaacatgtagatttattacttgaacctaattttattacagaagaggatgcaaataaaaagaaagaaccaatagaattgttaagaatgttagcagttgttaaatggtttatttcaactttaaaatctcaatattgttcaagaaatgaaactttaggttctgaaaagaaaccacttaatccattccttggagaaattttcgttggtaaatggattgattcatcaaatgatcaaaaattaggtgaaacaatacttttaagtgaacaagttagtcatcatcctccaattactgcttatgcagttgaaaataaaaaaaataatacaattttagaaggttataatggtattcgtgcttcaatgtcaacaactgctttaaatgttaaacaatttggtcatgctttattagaatttagaaatttaaatgaaaattatttaattactttaccacctttacatattgaaggtattttagcatttaatccttatgttgaattagaacaaaaatcttttattcaatcatctgctggttattatgcaataattgaatattctggtaaaggttatttttcaggtaaaaaaaattcttttaaatgtagaatttattcaaattttgaaaattctaaaaagaaggaaaatgcactttatacaatttcaggtcaatggtcagaaaaatcaacaattgcaaaaggttattcaactccttcatcttcaaaggatgaaattttctttgatgcatcaattgaaaaacctcaacaattaactgttaaaccaattgatgaacaacatcctttggaaagtcaaaaagcatggttagaagttgcaaatgcaattaaagttggtgattatgatttaattcataatgcaaaatcaaaattagagaataatcaaagagaattacgtaaaaaggaagaagaaaataattcaaaatggaatcgtagatggtttgatgaagttgattataaaattgatgaaaatttaaataatgaaaatgatattttcataaatttatcaaaaatggcaaatttatcaattaaaaatgtaccttcaggtgttgaagctgatagttcgaaaaataaagaagttgaattaatgtctcattggagattcgtacctgaaaattttgataatgaaaaggaaattaaaatataatttattctatattttaaattttatattttagtgtctttcttatatcatttcatttcattttaattgaatttaaatttatatattataaatttataacatttttttatatagtatatattatatcttgcactaatttcacaacactacaccccttttatctactcttcaaatccataatcaccttcattaaatgcttcatttctaattgattgaatccatggatgttgtaataattcaactgcacttgctctattctctggattaattgttaaacattttttcaagaaatcttgtccctgttcacttaattcattattatttggtaataatggtaaatgacctgcagcaatatgatacataactgcaaattcattatctaaattactccatggtcgtctacctgttgacatttcaagaacacaacaacctaatgaccaaatatccattgctccaaatctacccatgttaccacctttgattgtttcaggtgacatatacattggtgtaccagttaatgcatgtgatttcttactctcacctatattcttcataatactggtattaccattagcactcatacttgctgtcatactaacattattaatcgtattaccaataatactaccacgacgacttctaatctcaccttcttcggtaattccattatatggtgaaattgatgataatgaattagatttaattgatgcatttgcattattattattattattattactattactatatccatgatatcttgaattttctcctgtatttatgttacttgaaatactactggttgaactcgatggtacatattctgttggtgttggaatattcaatgatgatgttgaaacgttactactattcatcagattagagccactattattactattatttgaatttttatcatcattactaactgtaccattattacttgccgtaccactaccactatttggaattgcaataacttttgcagatccaaaatcaacaaatttaataactcccatatgatctaataatatattatcaggtttaacatctctatgaacaataccaaattgatgtaaatatgctaatgcttctaacatctgtaatgtatataattgaattacaatttcatcctcaattctaccatattctaataagtttgataatgaaccacctgaacaatactccataaaaatataaactctatcacgatgaacttcaacaccaaaaaattgaacaatgtttggatgtgacaataattctaaaactgacatttcacccttaatagctggaacaattgtcttaattgattgtctatcttgaaatttaatttctttaactgccattggtccaccagtatccaaattaacagaggcgaaaactgatccaaatgtaccacctcccagaaatttacccttttgccaacgaattgaaacacttgaaaatgatgatgctaagtatgacaataattgattctccatattggtatcatctaaaactctaccaactgaactttgttcaacttgtaataatctacgttcttcttcaattttgttaacttgtgacataatatgttcccttaaactacgtaatgattcatcatcaagcgtaaagatatctttttcaatcttaaaattataattttgcattctacttttctgtaattctttagctcttgcacccataatatcgaaatgtgaaattaataatgacatacatgctgcaactttttcctttaatctataaaatctttcagcatctaatgttaaaatgttaaaacctcttgtaacatccatagcaaattctaatgcagaaacacaccatctaaaagttttaacatcagatggtgaacaatcatcaacaataaaacttaaccattcaattgataatttaattaaacttaaaataatagaatttcttgcacttcttgaatcaattaacataaatgtagttctaatagtatctctaccaacatctcttgcaaacatgaaaaaattattaaccaattcttgacatttaccaatacttctacattgatttctaatagttgatgttgaatcaatagttaatgaagaaattcttgaaaataatttaagtgataaattaaaatttttagatatacttggtaatgaacaaactaatttagtatttgatccaattgttgaacttgtaaatcttttgaaaacgtcaaaaatttcctctgcattatatttatgaccacccattgtcaaaaacaaagcttctcctctcatcaatggatctaaatcaactttagacatctcctcaaatggtacaaccagtccatcccacatcaatgcctttggaggtacaatggcaataacataatctaataatggttcattgtattcatcatcgtcttcttcttcttcattattaactgtagacaagcttgtttggttggatggttcgttatcagttgattcgtcaccaagattagatttttcatgttcatgttggtgttcacctttatttttatgagttttgctatatgcataatttccaattgatggatgataacttttaataacatctaaatgacgttttggaattttagaaaaattaacacctaaatatttactctctaaaatacattgaacatcatatggtctattaactaaagactctgaaacaaaaagataaataccattttctgcaatttttgaattatgatataatgcatgatttgaatcttttaaaagtgaaaaaaagttttgagttttatttggtaaaactttaaatttaacagaattatgatagtattggactaaatttgtttcaaatctaataaattttctacgtaattgaccaaagttttccattgttgatgtataccaacgaatcaatctttgactatctaatctataaccatctgatggtgggccttgaatttgattttgtaaaaatgcatacaatctattaattaatttgataaacaatgatgtcatagatgtggagaatctagctgaaataccattaatataaaatcccatattttgtaagaagagccattctctctccaactcatcaggttccttgtatgttctgaatgactttcgtactctttggagaaaacaataactttttattaactaaaaccatataatattcaacacattcaacaatagtattgtcaaattcaatatcttgataatctggaaatgaaatccacccctcgacaggtgcacaatattcaagcatactgattctaatttcaattgctagtttaaggtatattttcaaatcatccaatgtttgatcgatcatcatcattgttggatttttaacttttttagcatagtctaatctcattttaataatttctttcatcagtttagatgggaaattagttaaaacaaataaaatatctaaatatgaaggcaaacctaataaattaaaatattgatgatattgtaaataggaagttttagctttaattgtccaatgagagaatgttttaaactaatcttttatcaaacagattttcaatatccttttctttgaagaattttttcaacgaaaggtctatcatctctgaaaatatgattattactatttttatgattattattttgatctgaattctgaatcatgaatcatttgaaggttttcaaaatatctaaatcatcattaccaacccattgttttaagacattactttcacgttcgaactgcttcagtaactgacatccaagcaactaaacaatcaattctatcactgaattcaggtgttgcacattgtggtttatcatttctcatttcacttgatgttctccatagttcttgacatttttcatactttttctaataataatgaaacttttgatgaagcaaatgcaactttatcaatatatgacataccaattccatcatttggtaacactaatttaaaatttaaaatttcatcaattatatcatcaaccattccacgatgatacaaaactaaacgtctttgttcctcttctgttcgtccatatagtttagcacgtataccaatccaaaaatcttcattatattgaattcttaataaattattactttccatttctgatgtcaaaggtttaactaatttagtcttttcaccatgtgacaacatcacctgtaagaacagtttgaagcattgtttgccattctattctttctgaaatagcagtacgactggcatttgatggattatttaattgagtttcatcatttctatttagtaaatctaataaaacattggaatctaatgagtattccgtaattgtttctaattgtttattacctacttcagaacaaagttgttgacttaaagccttcaacgcctcatattctctatttatatcattggatataaaatcatcagattctaaaattttagaatctaaactatttgttttacttttcaggatatggttataatttgtaccatgaacgcttaaattttgtatattattatctgataatgtcgggtattattgatgatgaaattgaagagatagaatgattatgttgaatattttcggtttccgtatcattctcggtatctgtttcaacatcctcagggtgcaacaaacttatcataatagtcatcattgatttaaatatctattcttatacttggtaatacttgctaaatacattttctcttgttgctggtatttttgagaattctttgtgttaaaattacttttaagaatggaagtttgaggtctaacaggttcaggcaattgattgtaagattgtttttgtgtctgtttgattcttattaaaagacttttgctgagtagatgatgatgatgaatgatgaggattgttgttgctgctgttgttgctgttgctgagcattctgttgttgttgttgttgctgctgatgttgcgtattctgctgtgcttgttgttgctgtgcactagatgatggtaatctttgtaaaaatgatggagatagtaaaggtctaccagttgatggagaaattggtggtgaagaagtatcatgaccgggtattttcagcaaatcttttttatcaaatatattatcaatatgagattgttgatgagtttcaaaatttggaagaaagaatcacgttttattatcaggtgaagtagttggagtaccacgaggtgataataaaattggagttgtttgtaaatttgaaattgtaaaaggttgttgtgacagttgaagtttaagtttcatcttttgaggttgtgttgtgtgtaatggtggtgatgaaggtaatgtaccattatcatgaactgatgatatacttggatgtcttgataatttagcacgtaaacttgtagttggagcaatagaaggactcaaacccattgagtctttctgtcccattgattcatcattgtccttcttgtcgttattattcaaagattgttccatatctgttggactggaactcatagttgtagaagatatatttagaaaaagagtgtatatattagttcgaaagaaaagaaatatactaatatcaatcctcctcggcgttggaaaatgtagaatccttacttataattataattataactttttataatcttacgtaataatttaagtcaattttctcaccaaaaagtgcttttttcaccaaaaatcacgacactctttttgttgtgggctcaacaccgtttttacatagtaatttagctgaaattgtgtggcaacatctggattccgacaaagtagctacaaacaaaccagtggtaccattggaaagagaaaaaaagttattgtggtcctacagagagacatttcaagatttgattcccaattttctaaaaatcaaaaaaaggtgcccaaaaaaaggaccaaaaatatcactaacttcatcaagcttttttcaaatattgcactatttgtaaacaatataacggtaacgtttccggtacaaccaagagaggagattacaatgagccatgtccgaagtgctcaaggttaatgaccattttacaggactttgttaaaaaacgcaaatttcaaactaaaaacgtttataactccatcaatagttactgaaatcaaaaactaagtacatgattggatagagaaaaatcgcggctacaaatgtgatatttatgagatattggtgagggggaaaccgaagacttaggttttcagaaaattatcttaaatcgctaaaaaacatattataagcctgggatagtgtggtaacatgaaaaacatgtattaatttttgagggagggagggcgatgggaatatttattgaaaccctggtttggcattctatatagtatagagatatatactagttatatatcaaggaataagagttactacctatgacgatagatactgctgaagtgttggacttggatcgatgtttggagaaattatatgctggtacattattatctgaaagagttcttgaaagtttatcatttaaggcaaaggaaattatgattggatataaaaatattgttgaagtttcatcaccaattcacaatagttggtgatattcatggacaattctatgatttacttgaaatatttaaaattggaggttatatacctgatacaaattatttatttttaggtgattatgttgacagaggatatcattcaattgaaacaattagtttattaatagttttaaaaattaaatatccaaatcgaataacattgattagaggtaatcatgaaagtcgacaaattacaacaaattatgggttttatactgaatgtattaccaaatatggtgttgatagtaaagtttggtcaatttttacagatttatttgattttttagttttaagtgcaattattgataataaattattttgtatacatggaggattatcacctaatattcaagatatacaaagtatatcagttattgatagatttaaggaaataccacatgatggagcaatggcagatttaatgtggagtgatccagatgttgaaatacttaattttagaaattcttcaagaggtgcaggttatcaatttggtattaatgttgttaataaatttcttaaattaaatggatttgaaaaaatatatagagctcatcaattatgtaatgatgggatatcaaattttttggaaagggtaaagttaatacagtttggtcagctccaaattattgttatagatgtggtaataaagcatcaattttagaaattatgggatcagagagtgataattttagatttaatgttttcgatgcatcacctgatagtgaaaaggaattaattgaaattgaagataataataatgaagaatggaatgaattaaataataatcgttcaatgatcaaaaaggcagcatatgtagagtattttatgtaaattatataataataataataatattaatattaatattaatcaaggacaaatctatgaatagtataattctaaatttgttccatcattaatttcataatcttgtaatgaaatatgatctttgaaaactgtataacctctctttaatgatatattttgaggttttgaacccatttgaagtgccagtacttgtttgaattcaccaattgtatcttcaggtaaagcatttaactatgaaatttccttcccaaacgatcattacatgttatttcaagcatggttattaaaggttgtaacaaaatcagtaatagaaaaagtaccttgtggtataaaaataatttaatggtgatgaaaaaaaaacttattacgtgtgcatgtaaattaacgtttctctattcctgatatattacctcttttttctttcttttcaccaaacaatggacgatagcatcaagagtccgttcaaatttgagtctcagacaacattgggtgttcctggatcaccgggctcccctggtatcttaccaaaggccaatcgagctaatcgaaatagtatgaatagtatcaatgctaatttccgtcgaggtcataggtacaaacattcatcagtgtcaatgaatatgtttcaaaatgatatgcctgattttaaaatgacgcctgaagtagcagatataaagcaaaatgtggtgatagaggagaaaaaaaatccattgttaattttaattgttgcaattgaaataattattttcggtattacattttattgggggacattggcattatcaattactgcatgttataatctagttactaatgtgatgaatggttggaagaaagaatggtttgcaggtaggaaatataatgttgcatattttgcattagcattatttatgatgtcagttgttcatggtggacatccacatggaggacatagtcatgaacatggagatgatcatgcacatgaaattgattatactaagatgaaaatgacctcattaattgcaataatagtattggtttcagcaattcgtagcatattggattaattcaaataactaatgggaagaagaatacaccaggtagtattaccagattatcatcagtaacattatcaccaccagaaaaggttacattagtacagaagattaagaaacttgccaatctcattagtacttagtataagtgtttccattactagtattattggagaatatttagagatactaaagattgtgccgttgctaatttcagttgttatatttttctatgaagtacttggacaatcgaagcaacttttattaacaggtccattgctgtgatagtgatcatttgcaatatcttgtaatgcaattacgagtcaaagtgtatgggatagtgaattatatactacttgagaaattacatatgatgatgccaacaatgaaatcatgtgtagttgttgcattgatacgtgtacctgaacatacatctaatgatgatgtatcgaaattagtattctatacagggacgattgttaacatcaactgctagatctgttctcaatagaggtgaatttcagtctagctcattagagagacgaggagtgatagattcacttgaatggaccatcttcaggtgatgtctctatcaccattgatatccaacagaagcaataaattccatcaagatatatagataccattgttgaataagaggtattcgtttattaatgaaaggggcagcgatagtgaaggctcgtttaaacaacgtttctttcatatatatgattattataatatacactctttatagatacatacattcttctaattaactctttatctgatgacaataactcgtcttcttctcattggccctgttattctacttacttttacaacttgtttcatttaccaaacatatttaatcattacagtacctttaatatggatcagaaagagcaatcccgatcccgatcccgatcccaaaaacaacagcttccacttagagaagcccttaataataaggggaccacctatcaatggaacaaaactctcactcaatgtctaccatgatgcccttagacacgcagaacgacttgaaaacgtccttgtccaatgggaatcaataaacgttactgaaaacacaggacataaacccccattactcttcaccattgtctctatgatcattaaatgccatcaactcaaccaaggagttcttcaccttgtacagtgacgatccaacccttgtcaatgtaagtataataaatgtaaaaggctcagcggatatgatcaatataattcaaaggctcagcgaaggctcattcattttcctgaaaagtataaatactaacttatttcccccattttcctaatacattccacttatcacaggtttatcttacttttgtcggtttctctacacactgctaccttctatttcctacttattatgacatctgcaacatcctctgttttctccctattctgcggtttacttatgattatcactctatcattcctatttatacttactacacctttcttactcgtggtcggtgcgtcgatgctgacgtcagccgcaatggcattaatgatacagagaactggtgaatcactctatgcaagagtttcatcttctaatgctttacgtcttttacttgtccctattgctgataggatacctccatcaattggtcgtgttgaagttgaaaaatcttaaataagttataaataaattaattaattaaataggttatattatttatataataatggtttctgttgcttttgtatgtcttggtaatatttgtcgttccccaatggctgaagcagtatttaaagaattatcacataatgattctcgtataactaaagttgaatctttcggtactgcaggttatcatattggtgaaactcctgattatagaactattcaagtttgtgaaaaacataatataccaattaatcataatgcaaaacaattaaaatctcaacatttacatcaatttgattatattttatgtatggatgatgctaatttaaggaatgttaaacgtttacaaaatgataaatcaactgctattatacaattattcggtgatgaaattattgatgatccttattatggtggtgttgatggatttgagaaagcttatcaacaatgtgtcaaatatactgaaaatttccttaaatctttacctaaataactgtggatgattccttttcatttgatataatacattcaaatccactaaatgctgcatttaaacttctttcataaaattcattaattttaaaccctgatgcaataaattgtatatcttcctctaatttactataaaatggatctttataattatcacttttcttaaatggtaattcaatcattctatcaccattaaatggtgtaaatggtattttactcttattttcattctttatatcatttgcatttaaatttctcttaattgcatcttttgctttctatatttaacctctaatttatctaattgacttcgaaatctattcattttttcaattgtattatttctaattgtttctaaaatttcttctggatctttatcaatagatgcattctgtaattgatcaataatttgaacttttgataaattctttaaattcttttcctcttccattatttcactattaattctatttctctctgatttatattgtctttcaagtttttgtaatttaataaatttctcatattcttgttccttacgtgcattattcaattcaattgattgtttattatcaatagaatattgttttaacttattctctgtttcctcaatatccatcttattaagtaaattgaaaacaatatcttcaatctcttctaaatatttatcatacatttcaattgtttgaaaatcactctctttcttattataaacactgataactctcctacgtatatcacattctttctccacaattaaattttcaaaaacttgtgctttaaacttattacgtcttaaaatcttatcacaattaggatatggacatggtgatggacctagggcaaatattctatcaacacatgcatcacaaattttatggtaacattcagggtttatcttaaattgaatctctggtgataaatacttatctgttttacagactggacataaatctttaggaacgttatcccaatctaactcaaccatcttatattatcttttatactgtttgtcaaaagaacttaaaagaaaagacatttaacattgcttactaaaatcaaaaattgcaaaattgaaaaaaatcatgcacggaaaacacgttttaaagttcatgcaatcttcttcttttgaaacaatcactaaccatggatacttatatacgtgacagactgataattgataagaaaccaattacaagctcatttcttgcacaggaacaaaacatttcagtcaaacaagcatctgaatcactcatttcattcattgaaaataataatattgataatattcaactaacattattcaataactggttataaatcaaactaataaaatacaaatacatataacaactaaggaccaagtagatcaaatatgtaatcaattaaaggatacagtagtaatgttatattcattaagtgagaatggattatcattgactaatattaattcaatgtgtaaagtaaacaagggagtagtacttactaaaacttacgttgaaacaaaacaagagagatcaggcagtgagatcaagtactgcaccacaaccaataaagaaagaagttaagaaagaacctatgaaaaaggaacctgttaaggaaacatcagttaaaaaagttgaagaaactaaacgacctgtctatgtatcaagaaaggcatcaacaattcctgcaccaccagctaagagagctaaaaccgaaagtgataaggaacgtgagagaaaggaaagggagaggaaagagttggaggaaatgttaaaagatgatgtatttagtgatgatgatgaatatggtggtgttgtacaggatattaaggataaagaagttgaaagtaaatacgtttttgatgatattgatgttgcagatgaagagcaaccgaaagaagttacaaaagaaactaaaaaggttgaagaaccacctaaagaacctgttaaaaaattaccaccttcctgcagatccaacacctgcagtggaaactttcgttgatgcagatggttatgttgttcgtaagattaacaaaccaaccaaacctgactcatcatcaaagaaacaaagtaatcttatgtctttctttaaaaagaaatagatttttgtattgaatcagtattatatagtgagtcttggcatattttttttccaacatgaattattctatagtttatcttgaatattttctttctttctgtaaaacatgtctgaagaaattgaagcaccgccaccacaacctggagcatctttgatgctcgcatggcaagtcaaaggtatgtattgttttataaactaatatcaaatgaacattattgactaaccatttattttaaataatatagaaaaacacgtattagtcgttggggctggtgatgttggactttcaagaattgatcatttacttgcagcaaatgctaaaataactgttataactggtaatgatatacatccacgtattgaatattataataaattaggattacttgaacaattaatttgtcgtgattttcaattaagtgatttaaaattatatgaaagtgaaggtataagagaatcagttatggggaaatgtgatggtgatgattcattagatccattaaatgatgaaattactaaaaatattgaaaaatttgaaaaagaaaaatttaaaatggtactaacatgtgttaataattatccattaagtttaagaatttggtatcaatgtaaaaaattaggtattgatgttaatttagctgataaacctgcatattgtgatttttattttggttcaatttatagacaaggtccattacaaattatgattagtacaaatggtaattcaccaaggttatgtaatagaattaaaaataaaatgttagctccattatttgatgatttagatttaaataaagcagttccaaaatttatcatatttaagatcaaaattaaggaatgagattcatcctggtgataaaactcaaattattaaggaaagaatggaatggaataaaaaaataactgatcattatacaattaaggaatggacaaagtttgaattatcatcaattgataaaattgtttcattttatccaaattttccaaaaattggtgatttagtagagtagatgaatgggatttgttaataaacatttttatagtgatattagagatatatacttatataaaaaagaacttgtcatatacagaagttgtgttttgaaaaagaatactaaaaaagaactaaaaaaaagacgacaaaactaagctaaacataactaaaactagaactaaaaaaaaaacaaaactgaaaaagaaagaagaaaaaggagaaaaactaaaattgtattataagtaacttaaatcaatgtaaaattcaatcttgagatggaggactatcatttgattcttcataccttggttgcatcatttgatttggttgaaatggtcttgatggtacaaacatatattgaccattttgattaaatacatattgttgcattggatgacctggtggaggtggtggaggtggaccaccgggatgtccatgaattggtaacataccattatgattttcaataatattattagaatttgaactatttgttggaatttgatcattttcaacattattattataataaggatcatgaataaatggtggtggtataccttgaggaattccaacaattgttgattcgaccatatttggatgaatttggtttggtgataataaatgtggtggtacatttggttgtaaatttctttgattatatgattgattatgagaatttgtatttgaattattataaatttctctctcagttatattaccatcatttgttaattctgaacctgaactttgttgatttaatgtttgttcatcattatcgatataattataacctccattatatcctatattcatacccatattcatacccatattattcatttgagatggtggtatatttgacatatttggaatattatttaaattattaagttgtggtggtggtagattcatactcattggaacattcatattattcattggtaaattcatattcatattcatattcatattattcatattcatacgatacattggatgttggagattatttgaaatttgtcttgatctattatttggtctaccccaacttaatctaattcttgaaccactaattataaaaccttgcataccttcaattgccttctctgcatcttttctctcattaaatttaacaaatccacaacctttaccaggtggtactttaatattgacaattggaccaaatggttcaaacaatgctaacaatgtatcttcatgtaaaccatttgctaaaccaccaacaaaaactgtagtgttatttaaatcttcattattatttcttaattgattatttaaattattatgattattaaacattaaatctaatggttgattattatttctattgttcatattcatacccatattattcatactaatattcataccattattattatggttattattattattattttgatgtttaggagatgctaatgcaactctaatttgtctgccacctaaccatttaccattcatttccacgagtgcattcctcctatcttcttcattactaaatctaacaaatccaaaacatcttgaaataccggttgaaggatcagtcataactctaacagtttttatcgagttgaaatgtgattgaaataatgataataaatgagcttcagttgtatttgatgataaatcaccaacaaataatgaaaattctggagtttgagcaatttgtgaatctaaagttgcagctgaagcccaatttaatctaaaaaatttattattattagtatttggtataaccttaccatttaatgataaagcctcagttgcaatttcttgtgaatcaaattcaataaaacaataacctgaatgattagcggtaccttgaccattagttttagctaattgatgaattaataaatcatgttttggtttaattaatttaacttcaacatgtttatctaatttttcccataaatcagtaataaaaggttcatcccaccaagcttctaaatctcccatccataaagtttttgaaggtacagtatttgcaggattttcaggtggttgaggtaaaggaattgaggatgcagtatttggaattgaagttgttgaagaattaatttcattttgttgagataaatcagcggattctgattgatttggtattgaagttgttgaagaattattaaaataattattaatatcgtttatacttgaaattgatttagtattttcgttatcttcctgattgttattattatcattttcagtttttggtgaagaagaatcaatgatattgatattttctgatgacatttttatttaaaagaatatataattgaatgttatttgttgaaaaggggaataaagattgaaataaatttttgaatgatcttaaagtaaaaaaaaactgaaaataagctaaacgaagttgagcttaattgaattaaattgataaaattttaatgtaatttaatattatttaatataatttaatataatacaatgtaatatagtgtaatatttaatttaatgcaaagataaagatgaaaagacagaataaaagcaaacaattagctgaacgattgataaaatgaaaaagcacagatgttatgtaagtaagtatctttagatatactagatattataattaattgaacaacaacggtgtgattaaaagaacaagataaagaagataatgcagtaataataacagaattataaaaacaagggcaagaaaaacaacctggggaattcaatttattagcgaaggctaagtttcaaagaggggggtatatgcgtatattaatgtttgtttatttcattaaggtatggaatcacagggtgttatagactctagagagatcaggaaagaggctagaaggagaggaaattctcagaggaaagtagctttggatgattttgttttagaactgcctgatattcaaagaaatgatggtaatattgataatattccaattttatcaccacctagaattgtagaagaatctgagaagaggatattggataaacataaggagtttataactcaaagaataggtcatatggatgatcatatagagtatgataatggtgatgttgagagtgaagatagggatgttaatggagatgatgatgattcaactccagaagtcagacacgaaaataaatcaaagaaaatgaaaactaatgcaaaaccaaaatcaaaatcaaaatcaaatcaaatcaaagactttatatattccatcaactggtaagatgatcaaacattcagtatttaaaggaaaaacgtaagaatatgagatctagatcaattaaacttaattataaacgagttccaagtaataaagcaaaattaatttatattgatgttatatcacaaatgattaaagattatttacgtgatagtgaagtaattaataaattcattgaggaagtgaatgaaggtagtagtgataagaaaaaacgtaaaagaagagggaataaagaagaaggaaagtgataattataaggagattgttaataattgtcaaaatattataagggattattttgatagaattaatgaatattttggtagtttaattgatttaagattatccaatggattaattcgtaatgatataactaggatgaataatgaaaagaatcaattaaggaatgaaatatttcaaattagacaagagaggaataaaattggattagaaatgaaacaaactagggatgaattacaaaaattaaatattgaatataataatagagaggaattatataaaaaattaaagaatattcaaaatgggattgaatttaatgatgatgagagtaaagttgattataatgatattaagtataaaattgatcgaatagaggaaatgaaaatcaataaatcaaatgttttaaatatgataagggagattaataaacaattagaaatgagaattgaaaattgaaaattgaaaagtaagatctgtagtttagtttactgtataataataataataataataataataataataataataataataataataataataataatgataataataatactgatttatgtataaagtaataagataataaaaatgaaatattatataataataacaattatacattaattaatttaatatataaacttaaattaataaattttaaatatcatctgcaattaaagcagcaatcattctataaagatagaagaagaacataaataagaagaaagctaattttgagaaagattctctcttatttttacctaaagttctaaaaatttcagttgcatctaataaataatttttagtataaattttattagcattataagctaataaaggtaaatttagtaggaaaacaaaccaataaccattaattaagaataaaaatgtaaggaaaccatgaacacttgcctttgggataataaatttatttaatttattacataattcaattggattaatataatcacattctaaatcagagaatgaaattgagaagaaaacttctgcaaataatgataaagcattgataataacagctaaaatgaataataagacttcccccattgttaagttattaattgaattaagtcaaagataaaaaaggtaaagttggtgatagtaatacagaatagtcgagagagatggaaacctaaaaaaatcaaaaaaaccaacttttctttggctctgtctattagtgagattaataagattataatgagactaatattactatatggcaaagattgaaaaaaatattaaattagtttgttccgataccgggagtcgaacccgggtctgcccggtgaaagcggaccgtgatagccgttacactatatcggactaattgttatggtgtaaagtgttttgtcaaagtctttgcggccataacacgtgacctccgcgcttttgatgagtttttaatggttttaacggagaatttacttactatgtgtgataagtttgtttataatattaatatagagttataaaatacataataatagtgtatttgactgtatattcaaacccccaatgtctcacccatgactccccatgaacattctagcgctttacccccccccccccccatgagaaaaatttgcactcgcgaactcttgaacttcaagaaaattttcactctttgatggcattcagatcaatagcatgaatttttttaattattttaactaatactcttctatacttttgtttgttcctataaacaattggtcactaattgattatattttcaaaattgaaaaacttcaatgaacccctgtcaattttgtgattgtaaaggacaaatatttcatgaaatatatgcatatgacgtgtttttccttcataatcacagaattgacaagggttattgctgtttttatattaaaatgaaagatggtttattgattggtcaatacgttcctgatactttttatcagttcattactctcctaattatttttgaaaattaaagtttgattacaaatagtttaactaaagatctagaaagtgttttttaaagaaattctctcttgttttagggtggagggaattaaataacctttcttgttcagcctccgttgattttggacagaaaatttctctgtgaccattctttggaatttcaccttctttgaccttatgttttggattagaacatcttctacaacttggtttcattggacatctagctgtagtgtgatctgtacatctacagtatacacagtgtgtaggtgcagtggacaaatatgttgtaatttgaactttatgtgtttttccacccgttgtgtgtgagatggattgaattttaggtggtacaactgatgattttaattttaacactgtgtaaatgattttattttgttcgtagaacttcatattgaatgccctattggattctttttcttgtggtaattgacaagacataatttctccatattctgaatagagatttttaataattttatcatatttagatttaatgatgaaaggagggaactccgttagtaaaacaacaagtgtgttgttttcttcgaatgattgatctaataaatttagatcatatgaattaaatgtttccactaatatggtggaaactaattgtaataactccattggaggttcaaccaatggtaaattaattttcaaactgtatttgtcagcattgaacatatttgcatcttctttcactgtgttttctatagatgcagtattttggttgttcatattgttatgaactttgttaattttgttaattttttggtattttttttcatttaaaaccttgctataaataggtcctttaaaaatgatgatataggatatcatttaattttcccttgtctaaaaatttataaaaatcattttttaaaaagtatgaaaggtgataaatccatcgtcttcatcaactgtaatatttgcttccgtaattttgttacgtagttgttcagcaaacttcataattggttagagttttgttggcgcatctagggccactctagtattcctcttgatcgtgagtttcgtgctcaatttgaatcaacccttcactttctcttttatcagcaaaaactagggatcgcctgttgagctcactctgagttaaggtagtcattttggtaccgttaagattgtcggggaggatctaaatcaaaaatctctattaccttttattggctggtaaaatataaggaataatactaaaagactttatttggtttataaaatttaatattgaattcccttttgaatttagttatgaaaattcccaagacatgatttctccatatatctttggaatagagcttgataataagttcatcatatattgtgattcaatgatgaacggaggagactctgtttttaatgacaaagtcaagtccaaatatatgatgaattatcatcaatctctattctgaaggagatcaccccatggtgaagtgatctaaatactgtaatggtctgtaataaaaagataaatctttcaaaaactaaacgtagaaacttgttttttaaaaaaaattgatgctagtctcgtcactgcattttgaagcatttttttcaaaattatttttttattcttttagccaatatatttgcaaaaataagtttacaaatcaaaacagttcgtttatctctactgattgaccacacttgtagtcaaaatatactctgctttttgaaggccggcttacgtaagcagattcaaaaaatggaaaaaacaaaataaaaatttttgttagcgtaaaagcctggctagctcaatcggtagagcgtttgactcttaagtattgatattaaattaatagcaatcaaaaggctgcgggttcgagccccgcgttgggctttacttttttatttttttagattcctaaatttttttttgttgggacaataatttttggatgattaatataaaatagtcagttattattattattacaatagcaatggtaatgtcatatgatggtataccaaagggatattttttaggattaaattatgaaaatattcaattaattaaggaaatacttgaatggattgatattgataataataatagtggaaatatccaagtaattgatattggtagtggtaagggatttattgatagaatattaacaggatattataatataccagtttattgtattgaaagtaataaagatagaaattatcaaagtattaaattacagagattaattaatgatgataaaattaatcgaattgatcctgataataataataatattaatgcaattaaattattaggtagttgtaattgtaaaataagcaattatgaaagttactgtaaagttgtaagggatgcgttacaatttttcaataaagtaagtataagtagtactaatagtaagatagttataattggtataaaattatgtggggacatgatttatgaattaattgattatcaaataagatacagagaggaatataaagatgaagatgaagatgaagatgaagatgaatatgaaatgtttattataccatgttgtacagagttgagtaaacgtggtggtaacagttgtgataatgtaatgaggtattgtaaagatatgaatacagtagcagaaaagagggtatttggagagaagtattatggagttaagatatagatacgacatccaatcaatcaatcttaataattaccgaaacgggaaacataaaaccgcactttgttttgttttccttttcgcaagtttaaattttattttattctcatgggtttttcaaagttttccatgttccaaatttttttcatttaaattgatgacacttctatttcttctatttcttcttttgtttttgttttgtttattctatgttctaaagtttattttaccttcttctacttccttttaatctcttttatttgtcaagaacattcaaatgaaatttttatcttcttctgcttggtcaattgcagctttcactgctttttctgctgcagccgaaactactaatagctcatctgcatcttcaaataatataacttatgctccatatgatgctacttgtccattatataatttatcaccactttacaataaaacttctcatgatggtttcattcgtaccaattctttaatttctcaagatgaatattcttatatttctgcaagacaagttaaagcaaaatctaatttaattgaatttttagataatttaaatatcccagattataatgaaacttcatttgctgattatttagatatcttaaatcaatcaaatattaatattggtttatcattctctggtggtggttatagagctttatttactggtgctggtgaattaatggctttagattcaagaacaactactaattcaactttaaaaggtttattagattcttcagtttatatcactggtttatcaggtggttcaatcttattatcaactttagcttttaataattggacttcagttgaagatattatgttagataatacaacaacaatttggaatacttctagaccaccagttagtgctgatttaaattattgggctcaattaattggtgaagttaatgaaaagaaaaaagcaggttttgatatctcccttattgatgtttatggtagaattctttcaagatttatgtttgaaaaagaatttgataattatggtttaaatactttattctctgatcttcaattctctgatgctttcatgaattatgatatgccattcccaatgattcttactactggtggtacaactaatggtacaaatattactgattattcaattaacgtctttgaagttaatccttatgaatttggttctttctcacctttagttggtggttttattccaattgaacttttaggttcatctttagataatggtttaccaattgttaatgaccgttgtacttacgattttgataacgttggtttcttagttggtgcttcttcaaatatcttagaatctttccaagaaccttttgatttattaatgagtggtaatcaatcaattgctgctctcttaagtgctcaacttggtgctaatgttagttcatcatatattgaattattagttaatgctgtcaaccctaatttaaatgaaactttatttgcagttcttgacaacccattctataattcctcattagcttcaaatgaaagtgaagttgctgatggtaaattattaaaattagtcgatggtggtttttttgaagaatcagttcctcttgatcctatcttagcacctgcaagacaaattgatattgtctttgcttttgataacaatgcacaaactgaagataactggccaaatggtgactcattatatgcatctgaagaaagatggttaagttcattccctgatgatgaattttatgaattaccttcctcaagtgaagaatttgttgaattaggattaaatacaaaacctgtattctttggttgtaatggtacttcattaattactaaccaaactaatccaaatgcaactgttgaattcaattacatgaaacctttattagtttatattccaaatacagattacacttatgaatcaaatattaccaattatcaattcccaatctcagaaagaaatgctctcattcataatggttttgaaattgctcaatataataatgaagaagatgattttgctcaatgtgttggttgtgcaattattagaagatctgaagaaagagaaggtattgaattatctccattctgttcaagatgtttcactaaatattgttatgattcatcatatgttgaaactgatttaggtaactcaactttagtctcaaatataactgaaaatatcccaacttcaatttactcatcatctgcattaccaagtgcaatgtcatctttattaacaaagagaagtaaagcaactgttttcccaactgttttcccttcaagtgcttattaggatttatgattttaatataacatacatttatttatacctacaaaacattttttgattcccattcgtttttatttaattaaacaaagattacatttactattgacagctctatatagctcttatttttttttaaaagattgtatatttacatcgtttttatataatttaaactattaaaagcattcatttactttcttcatacttaattttccaagaatttaaccattgaactctcttttcattattattattgattttacgtactaattcaactatttgattaatttcctttgttagtaattttgatgctttctcaacaccatttaaatcggaatcatagataatacatgcaattatatcatcaacatattcattaagtttcaatattttttcatgtagtatatccaaacttttagaaaatttaacagtatattcactacttggaattgatttatctaatagtgaaattaataatttaactaattgaatttttttactatattctttaccagcagagattatttcatcacctgctatatcatctccatcatcattatcttcattcccactatcattatcatcaccatcatcatttaatccaaaaatatcatcatcatcataatcaaaacctcctccaacaattggattttctaaccattcatttaattcatctaatgcatcaataattatcttatttgttgatttaagtttatttcttaaaactccacttgagcctgatttactagtttttaaaagtttttcacatgattcccaaaccataccaacacctataagtcttggatcagactttttgtttccttcattatttccttcattacttccttcattttcttcctcatttggtaataatttatttaattcttgaataagtataattacagtatctaaaacatttaatgaatcactacttaattcattaatgaaaacttttgaataaatttcaacacttgaatttaattgagttaaaagtgatattaataataacgaatatctaacaatattatcaatttctgtccaacatgcctttaatgttgaattttcaattggtggtttgaaaactaatccaagttttgttgcatgtgcactaataagatttgtaagtttcggtatttcatctaatggttttgcaatttttgttgattctaaattaattaaattttcatttgaactagttattgaattttgaaaattaatttgcagttgttgtaaagtttcttgaactgctgtaatatgattggacaaatcagctggtgtcttctccattgtcgtttgtatgttgggaaaaagaagattctacaggtctttaaaaaaatattttttttccacaagaaatttcatgaaatttttcatgctgtgaagattgaccggagcttacactttatcttcgttttaacgttttataatctctacaatgtatacagatacagaatactatactataattctaaaaaaattctaccaatcaccatcactttcatcatcagatgctgcaactttcgcctttcttgaacttaaagcagcggctaatgcatctgcaagacttgcaggttgaccaggtggtgcaccaccaccgttatttgaacttgtagtatttgtagtcgttggttcaccacgagcttcctgtaataaaacacttggtttatctaattgtgatttatcaactttacgtaaagatcctaaacctgcacctctaattgatgcaagtaatgcatctctacctgcatcacctgtatgctcaactggagctggagttgaatcaaatgttggcattccaggtggcggtggaggtggtgcagcagaagaattaaatgtaggcataccagctggcggtggaggtggtggagctgcagcattagagttgaaagttggcatacccgctggtggaggtggtggaggaacagattgctgttgtattggaggaggtggtgatattgattgttgcatttgttgttgcatcggaggaggaggcggaacttgttgttgcattggaggtggtggaacaatacgttgatattgttgttgttgtatttgaggagaaccaggataagcaggtggtaaaataggtggtgattgtgattgatgcatttgttgtgaagttcttgaaggaggtggtggaggagcaggacctcttctaggtggtggaggagctggtgcattaccccttgcaggaggtggtggtggtacgttacctcttgcaggtggaggaggtggtacattacctctagctggtggaggtggaggtacgttatttctcggaggtaatggcagaggtctattggtagttggtattggtgatgaagtagtcggaggtgccaaacgtggaggcagatttgggtgaggattatttaatggaggtggaacattatgagttgggaatgtcattggaggtggtaaattatgaacattacgtttttcaggtataggagaaggaaatggatccgatgatgggacttgaggagctgatggtgcaggtgatgaatattctgaataagaatcataatcatcattagattgagattgagattgagattgtgcaggtggtggtggtggtggtggaggtggttttttatttcttctactatcagaactcattgaacttacagttgttgatcttgatcttgatgtaacagcttgtttcatcgaatttgaattagaattagaatttattgatgaatgattattaatcatattttgatattttcttggaattggaggttctaaaccaactaatggaccaccttgttttgtaatataatcttttataaattcacgattttcagcaatcatatcttctgtaatacccatattttctaattctctataaaatgatctccattcaggtggtggttcattatcataatatagtacaccttttgctcttctcattctttgttcattgaaaattgtatcagaattatcagtttcattattattattattaatattttcacctctaaaacctcttgaatttttaatttcatcaggtcttttacgtgcttcaactgcattattattctgtatagttaatttagatgcatgtttatgtctatttattactcttttataaaaatgttgagcatcagatttatcatcaaataggaaaccaattgaataatcatctgattcaaaactatgaaagaataatctatcttgagaatattggaaatctacccataattcatgatcccatataataccttgtttaccaattatatcaactaatttaaagaagaaagtatgaccaattaaatcatcaacaagtattaaagcacctgttaatccagtccatttccattcatctttatcaggataagttacatataatctaacaattgcagcatcaataattttattagaggatttgggtacaacccttttaactacttctttatcctgtgaagatatccccatgatcaattgtctatatcaaaggaaaagaaaggaataataaacatcaccattatcatctccaaataccacagagagagactttacgtactcgctttctctttatgtgggaaattgaaattgaaattgaaattttagtactaggaagaagattttatctcttttgatactttatttcatttcttcctaggaagtaagagaaacaatgtccggtagacaaggtggtaaggctaagcctcttaagaaacctaagaaggcatctaaggatttagatgatgaagatcttgcatatcaacaaaaattaaaggaacaaaaaaaattagagaaagaaatggcagcaaaggcagctggtaaaggtccaattgttggtggtggtattaaaaagagtggtaaaaagaaataatcttgtactatttaatctaatatactatactatactatactatactatactatactaatcttttatacattatatataagtaacatatcagtcctcttaatagaagtaatctcttaattcattacataatcaaagaaaatgattaatttggtgattttcataatgttggacatgatatagttatatattgatcgactgattgattgattgattgatctttcttagggatataatatacaactagattaccaatgagtgataagggtacacagaaaatgctgactaaacacaagattgtgtttcttggagatcaaggagttggtaaaacttcacttattacaagatttatgtataatacatttgatacacattatgcagcaacaattggaattgatttcctttcaaagacaatgtatttagatgataaaactatacgattacaactttgggatactgcaggtcaggaaagatttcgttcattaattccttcatatattagagattcaaaagttgcaatgattgtttatgatgtttcaaataaggaaagttttgatgatattccacgttggtgtgattatgttagaactgaacgtggtaatgatgttataattgtacttgtggggaataaatcagatttaccatgatagagtaatttcaactgaggaaggtgaaaaattaagtaaatcacttgaatttaatttatttatggaaacaagtagtaaaaatggttatggtgttaaaaatttattcaaaaaagttgctaaattattaccaactgctaattctggtaatgatgataatgaaatagataatgcaattgatcaagataataatgctcaaactattaatatatcaactgatacaaaggaacctgaaggtgattcatgtgcttgttaaaaaaataactaaataattagtaaattaaatcaatacatatttctaattgtatttctatatttttatatattatatatattataatctactataatatatattataggtctaaataatttaataattaaataaaataagatggaaatgttctaaaataggaaggaaaaaaagagtgaaaagtactactatcatatcataaatacttctttaaaccctttaatctatttgcagcatcaattaaaacttcatcatctttacaaactgcaaaacgtaaacaatcactaataagatgagcatcttcaggtaaataaaattcacttggaggaattgagacaacaccaaattcttcaattaaccaataagctaatttaaaatctcttggtttattagcaattaattcaggccattctaattcaggtaatttaacttttttcatattaactaaaaggaaataaccaccatcagctcttgtataaggaatatttaattcttcgaaagctttttgtaaaatttcatattttttcttatattgatttctcatattttcataataattatttgaatctgcaatttctaaagcttttgcaactgcaacttgagttgcacttggagttgaaaagcaaattcttgtatgagctgccttaacataaggaattaattcctcagaaccaataacccaaccaattctccaacctgttgcagcaaatgtcttaccagcagaaccaacaaataatgtacgacgtttaatttcaacattatctgaagctgcaattcttgggaattcagaatcataatataaattttcataaacttcatcagataaaataatgaaattatgtttaacagctaattcaccctaacttatttaattcttccttagaaaagattttaccaattggattatgaggagtattaataacaaccattttagtatttggagtaattaatttttcaaattcatcccaatcaataaaataatctgaaccatcaacatttttagattcaaaaccttcaggagtatgtaattttgcgaaaacaacttttgcacctgtcatttcaatatttggaatatattgatcaaagaaaggttgaaagacaattacttcatcaccttttgaaaggaaaccaaagaaaactgcaaacataccttcatttgcaccagttgtagctaaaatttgattatttgataattcataacctaattttttagaataatgtttttgtaattgattaactaataaaggtttaccttgaggtggagcatattgattatccattggttgatcaaaagcagtcctttgcagctttaattgcaaattctggaggtgaataagagaaaaatccttgacctaaattagcaactttttcaccacttttagcttcctttgcagcagcagtttcattaattaaagaccaaatatctttaccaccaagtgaaaaatatggattatttgtaggtaatttcgatgtacattttatttaataatgaatagtttcgtacaattgaattaggcaatggtctgagtgaggatactttaaatacagaagtaaatgccagaatgcgcatgtgctgaaacctgaaaagatccagaagcagaaaattacccccgaaagagaaaacatccagtatttaaacaaactgttgaaagcattataaaataaaactgtggctcaaatcagcataataataaaattaaaattaaaacgctcccacagtttttgcgataagagagaatatgactcagtagtataaattacttagtattacatgaatcgctcgtttttgacgttttttctgatttcctctttaggaatatttaattttttttcattttcattttcattttcattttcattttccatttatttttattttattttacatttctattggtaatggaaacaccatttgaatgtcctcattctgctttggaaaatgctccacccgctcgtcatactcgtatactacgaccttatatagaaactctcattgctcacgatacagagaaaccaattcattcaaatccttataatcgttttaatattgcaagagattcaattcgtgaagaaactttagaatattggttatcagataatgaaaataatgatgatgataatcaaagtgatagtgatttatcatctgattctaatatacgtaataaaagacgcaggaggaggaaaaggagaaaattgaaaaataatgggataattgatcatgattcaatggttaaagtacctaatatggatcattcaaattatgaatttaattcaaatgaaattttacatttaagacaacaaatgtttttatcactttggaaaagagcaaaatctcgtaaaatacctagaaataaaaatacaatcaatgaaaatgaacgtgaacgtgaaagtatgatgacattgccttcaaatgttaaatcaaaggacataaatactgcattaatagcattatcaggatttgaaaaatcaatagagaaaaatcattttataaatttaaattctaatgatgataatgataatgataatataacttcaaaagtctcatttattaaatatctatctcatgcaattaataatttattctacatatcattatataatcaacaatgggataattgctataaattatttagtatactattacgtacatttgatactgatattttacaaatatggccattgggtgtatacattttaacccaactaaatactgaacaatttaaagaaaattttattaatgattggcaaacacattataaacatttaccattacctaaaatatcacaaaaaatttatcatgatttatcatttttacaaaatccaaatttagttgaaccattgattaatgatactccaatttctcataatgaagaaattattcatattttgaaaagaagtgttgttaagaaacgttcaatgcaagatacaatttttaaattacttaaattattaatgagaatttcaagaaatcaattccccttaattggtgcatttcctgaacaaatttatgtaccaagtggtataattaatcatgatttaaatggtgaaactgattatggaactgaaacccaaactcaaacggaaactgagactgatgctacaagtgttagaagttcaaaagttccatcatctaataataacacagaaaaggaacaatctgatgatgattcagtatcttctgatagttcatatgattcagaggaagtttatgaaaaaccattaccattgattaataataataataatattgtaccacaaacaagttcagaatcagaatctgaaagcgatcttgatagtgaagatgaaaatgataccaatattaaccttcaagaaagactatcatctcttattattaaaaaatcagattttaatccatttgaggataccagacaaccatttcaacatagttatagaacattattaactaatcattccacacctattcatagacatggtacacgtacacgtacaccaacatttacattatcatatttatggttattagttagaacaggacgaaatggtgcattacaacgtgcaattgaaccattattattgattgttccaacaagtattgatgcaagaattgcattaactgaaataatgagtaaattattagatgttataagtgaaattcaggaaaggaaagatgataaatatgatgaaggatttaataaatgggagaatgaagaaaatattaaattaaaattaaatgaaattgaatcatcatgggatacttggaaagatcaatttacgagtaagaaaaagaaaaagaggaaaggtgttagacaatatagtaattatgaagatgttgcaaaatctattgaaaatttgaaaaaactagttaatgaatgtttaaaagatgataaaaataataacaatcataatggtgaatcaaatagaggttatggtggtaggaaaaggaaagatagtttgagtgatagtgatgatagtgatgatattgatgaaggtgcagttgaagcagatgatgatgatgatgatgatgatgatgaagaggaaattaggaaagaaatggagagattgttgagttattctaatgttggagatgaaggaggaaaaatgtagagaatccgaataattcagaggaattggaagaagaagagattgatgatgaagacgacgaagaagttcaacgtgaaatggaaagacttatgggatattcacaagccattgatgatgaatttaagtgagaaagtaaatggagaggaatatgaagaagaagatgatgattatcaatttcaagcggaagaagaacaatttattaatgaatatgttacacaagataataatgatagtgatagtgaataattttactatcttttatttatatttttcaagaatgaaattaattctggacatttatcattatcagtgacatataattgaatgattttcaccatttgatttaatctgtaaaactattggattaatattatttggtggatcatattgacttatctctaattttctgtttctttagttcatttttcagaaattcaatttcatcctgtaatatcaatatatcatcatttaattgattatgcctttcaatactatttttctgtgcctctaatataataaataatgtagttatcgtatataacattatttcacttataataaaactaccatgttgtacattataattatttttatcattatctccgttgtttgtaactagtagtgtcttctctaattccgaattccaattttgggtcaatttaacagtatttatacaaatatttcttatacttttgtctctaatcgccaatgcattgatacccaatgcaagaggtttggataattgtcttacaaacagagatagtaaacgtaatggaggacctgccatatattgacgtcctttatcaaaagactcccttacaattagaaatcggataaatccatttatcagattgaggaaaatcatgtatatcatcatcaatttatacgtggctattttcacattttatgcattgtggttacatgtttactctttattagaacaagggacaagatggttatgacaatacaacaacaacgaatgatctttggtggttatgcagtatgtagtatgatagctacatattatagattctcacaattgaatgatacatcaagcaattattatgtattagcatccaaattctcacaaggtgattcagcaattatacttggtaatatgactgcagtaattacattgattattggtaatttattacaaaaattaatatttggagaattaaggttaattgaaagtgaacatctttatgagagatcatggtcaacaatacttggacttataatgtcaggtagtatctataaaagtggtgataatataatatttttagtaatgtatgcatgtggattaattttcggtaaaacatttcatagtatattatgtgatagattagatgcattaattcaacaatattatcaaatcaatatggtagatcatcataatgtaaagaaaacattaattaaaattatatttaatagaattatattaacattagttttattattacagattgattttaatgttattaaatctcatattgatgaatcatttacacataaatcaccaatgttaatattaatatcatttgaattttttattttatttatggaattaatttattcaacaattaaatatgttgttaatgtttatgaaatttattatattgaaagaaatcctgatgaagagaaatggttttataaagtttgggttgaatcatgttttcaaattaataattgattcaataaagagtattatgataccaacatttttcgtttattcaattagtattggcacatttcaattttgtttaattactgaatcatttaggtcattttatggattaggtacatcaattaaaacattagttagattagttcaaaattttagaaaattaaataatatgttacaaaatccaacaattgaagaaatgaaaaatattgatatgtgtataatttgtcgtgatgaattagaaattgatggaaatgaaaaaaatgagagtaaaaagccaaagaagttaccatgtggacatattttacatgatggatgtattagaagttggttacaaatgtcaactgcatgtccaacttgtagaaaagaagttttctcaaaggatggtgaaataaactctacaatagcttgataatgatatagggagagttgaaattgaagaaagagttgagcaagtgggactaattgaagaacgaattgaaccagttatagaaccagtggtagaacctacaagacaaccagaaacagtacatgatgcagaacgtgtaagagcatccaatgaagatagtggatatgattatgatcatactgattattccgataatgaaacagatgaagaaggctcatcaaggtcttataattatgatgacgaatatgcatttgaaggagaattttttccaacagctgctgatgatatgcagtattatattgataatggaatggttactgattttcatgaaaattttgaaaatcgtgaagaagaggaagaagaaggtggtgatcattatgaaactgatccatttgataaatatagagacgatgaaaaatgggagtatgaaaaggaaaagaagaaagctttattacattttcctcaaatgagtgtgaataatagtgataataataatgatgatgataatgatattgttaaaattagtaaaagattttccaaagattggattattttgaagacacaacaaacaagtgatggaaatataagtgttccaatgaatgaagctagatttgaaatcaagaaacaagataatgatttctttttaagtaagaaaattcaaaaacttttccaaatcaatacccaaaagatgactgacaatgaatgaatgatatagtggacatgaatgtataagaaaaatttgtttaataataatgatttaataagattattaagatacataaatacataagttaatataatacacaaaagaaagttgggatgatgcaaagaaaaaaagtgagattaataaatgattgaattaattaattttaatgattatttattctttgatctttcaacttttaaaagtaaagctttattaatatgaggtaaaacaccaccataagcaattgttgccttaattaaagtatctaattcttcatcacctctaatagctaattgtaaatgtcttggagtaattcttttaacttttaaatcttttgcagcattacctgctaattctagaacttcagcggttaaatattctaaaactgcagctaaataaatagcactctttgaaccaactctaattttactttgagcagttttctttaaatatctcttaattctaccaacagggaattgtaaacctgctctagcactatgagattgtgatttaaggtgaccatcttttgcacctgatttacccttaccaccatgtactttacctgacattgttatatactaaaataagcaaataaaaaataaaataataacaaatcaaaacaaatcaaaagagaaaaagtaaacaacatcaaaacggaaacattgaaaatcgaagacatgcaccccttccctttaaaattttaaattcgcgctggtttattacataatgctattacataatcaattatttaaaatatttgagagacacggtctcttgtctggtcctgccttgctctctgtgctctgtgtgatggtgctggtgggatgtgtaggatgtgtaggagtagtggtgctggtgggggtactggagagtggaggtagtagtgctggtggtatggtcgcttttatattcgtagtattgttcgtaatgttcgtaaggttcgtaatgttcgtagtattattattgctatagctcattggtggtggtggtaatgtaaactgttggccatattgtgatatataatttggtagatgactatttgccttaatagcatgcactcgttgatgatacattggtgaaatatatggattgttagtgttattattgttattattaatattattattaatattattattatttatttgagaatcaaatgatatattattagttggtgtaacattagttgatccatatggtgaatgatctgtaaaatttaaaagatatggtgaatttgtattggaattcccattagaagtgatactattattagaactaatactagaaatcgtacttgtattagaaatcgtactagtatttgaattagtagttgtattgggattcccattaatattagtagtattatctatattactactgttattgttattattgttattgttattgttattattactttcattatatgatacaactaaaggtgatattatacttgaatgatgttttggtgttataatgatcggtattggtttatctgataatgatggtctgaattgtgttacattatgtccattaagtaatgttgtacttcttggtggtggtaacattgcattattaggtcgatgttgttgatgttgttgatgttgatattgttgtgattgttgtggtgataattgcatttgtaaatgatgattatgaatatgtggtgaaattgatgatggtggtgataaattgcatggataaagtggcgtcttaggatgactatgtttaactatgttctttggattatatttactattgatattattaatattattattattattatttatgttgacattattgctagcaccagggatagtattagcattattaccattactattattattatattgatgtacagtttgtttatgttgacgtaaattatcaagtcttgaaaactttttcaaacaaaattcacattgaaacggtctttcacctgtgtgttttcgaatatgtcttgcaagatgttcagatcttgtaaataccatattacaccctttataacccgtacatttaaacactttaccacgtgcagctgatgatgaagtagaagttggtgtcgatgttgacgttgacgttgacgttgccgttgccgttgatatttttgttgatgttaatggagtatcgggcgtatcaggtgttggaggttccatggatgattatatttctattatttttgttattccgttaatttttgaacaagtgacagatatgtagagttatgagagaaggttcagtagaccaatcaagcattaatgaacaaaactgtacacagatcgtcaaaggtataaggtacacccttttgaaaacaataacaaaggggaaaaatgcggtgagtgaaaatttacatgtaatacgagttttatttagaaactgtttgtttgctgtttacaggtaaaggttatttatataaatacacggtaatatattatatatggatctgattacttatctggaggaacagtctcaattggagaggagtgctaaggaattcttacctggtaatatagatgaatgtacctattcccttggtcaaataagacaatcactatttgcatgcgtcacgtgtcaaaatgttgctctatgtgaggcatgtgcagttaaatgtcatacaactcatacagttgttgaattatcatcaaagagaaatactgcctgtgattgtggtacaactaaaacaaaatcaccatgttttgtacgatatccagcttgggaaactttagattttaaagattatacacccgataccgcctataataataaatattgtcataattatcaggggaaattttgttgttgtgatatgcctgaagataatgaaaaatatatggttcaatgtatacttggagatgcatgtaatgaagattggtatcatgatacgtgtatattgaataaaaatattgatcttgattcatttgaaacattaatttgttggaaatgtgttgctatgtatcctaagcaaattgaaattttgaaaaacattttgaatgcagttacagttccaaaggatgattcatatactttacttttgaaagagggtttcaaacaagtattagaacagcatattcaagataatgatgaaattaaagaattcttagaaaatcatccttacttgtatagtgaagacccaatatatgaaccacattcagatactgattctacatcttctctgtttgaactaggtcttaaacaaatgaacaaagtacccgttgagcaggtatcaaagggtcttgaagcatatgataacattaagtcaaaactaactgaatttctcaaaccctttgcggaaactggtcatgttgtcacagaggatgaaattaaagatttttttaaaactatacagaattagaataaattaaactgaactatttactattagctttaagtacttgtataataccttcccaacttttcttatcattagccaactcacgaagtctacgattaatgaatgcttgttcatctcgtatactcttcaatctcatttgatgaaatatacctttactatcctcaattaattgcttatttaaaatttcaatactcttcagttctcttgttttctcaactgctaaagtagatttctcttgatattcagctcgtataactccactttccttttcacttgcttcaatttccatcttcaaagagcttatttgttcctttaatgattcgatatcctcattactgcctttctttaaaacatcacgtacttcaactaatttttgatattcactttcattacgttcctttactttactacgtaattcaatctttgccttgatatctctattctttttgaatatttcaccaatctcataattcccaacatcaataatatcttctctatttgtttcctttaaatgaacatcttttaattcattttcactattatcaatccaaatattcattccacgaatattctcattgattaaattagtaaggtaatattgatatttttgataagtgaataccttaggaattccttcaccacttaatttaatacgtttatttccatctggtctcgattctaatgtatctttaactcttaaaatcaaactttcatcaagtactggtctatatttacttttaatcttttcattatatggatattcatgatttattggatcaataatccattcaatcatcttattatcatcgacctcgtccttctttgctttctcttcttcattactagcaatacttaataatgttaaaagtctactagaatgttcttctttctcttgcaccatttcccattcataatgttctaatgattcaataattataggttttaaaacatgtattttattcttaactatacttgacaattcttcactttcattggttttacaatcaagtgaaatgactaaatcactctgtaggtcctcaaattgtaataaatattttaattgtgatgataatataagataaatattaattcttttactttctttttcttctaatatttctgtaaactgtttattattcttggatattttaggtatatattcttctgtttcatcacgacccttatatttttcagtatcttcactaacggatgaactttcacgagctgcaattgcagcattaatttgtgcattttgttcacgagcacgtttctctgcacttgatggcctacccatctttttcttacgtttagtatcttcctgtgcagtattttcaacaggtgatttctttgtccttccattagttttccttttaactgttgatatttcctcaattttaatattttctcctatagtttcatttttagaattccaatggaaatcgaatgacccgtgattgtcataatataacgaggatccagaaaatctataatattgtaagccatttttaccaattaaaactgattcaatcaaatccatctcctttgcattagagacactgattataatagttttcttgactttcttctcaactaaaccatccaatatgttactgatttgtaaatatttatttgatagactaataatattttcctttgaattcaataataataaattttttggaatgtaatgatcaactaataatgttggatgatgtaaaatttgtttacaattaaaattaaaggcttcaaatatggaattatcagacatttgacccgatgatccatcatttcctatctctttcttaatttcaccatcagctcccttatcaatgtcatttggggaaattttcaaatcttttaaataagaaagtaaatgatttttatgtaattgaatgagtatttctttcaaccttttctgataaatggtctcgtgtagtggtaaataatgtacaggtaccttatctgattgcattgttccttgcaaagaagaaacaaatattgttgaaactgtcagtgttaatcgatcaacctgaaaaaaaagcatcttttcattcgctatataaaaacctacaaattgtacacattttttgctatatactgttaatattaatgttactaaataaactacttcctattcatgacaactactccaatgacgaatgtattcatgaaatccatgagatttatcacctcttagaaaacacatatcacatccatcatattgacatcgaaatccaaatgtttcaatccaacaatttttacccattttgtagcctataaaccctgattttggtaatttaacaaactgtccatttgtattaatcccatgtgtattgattaaatgacctctgtaacaactgttatttctctcataaaataatgaatcaatatcttcaccttttgtaactttacaaaatggacataatgatggataatcacgcttgatttttttacccttagaattatattgatcttctgtgatataccgtttaatcattggatcatatagtgttttcacctctgactctaagtattcaaagttcttattaccgaaatgtttaacaaattccaacgaataattattaggggtgttatattctctgtatgatttaagatttggtagcctgtcgataatttgctttatacatccataagtgtttttcgaaactttaaaacatccttcacatcgatgttgagcaagttcaattcttggtatatcttcaatactttccaactgattggggaaaattctttctgagcttgtgttagtatcatcagtatcgccatcattatcatcttcattattattgctatcacttactgtgtttggactaatatcttctactttaaacttatttttacttctattaccgttaggtaagacagtattttgattaggcttataacaaaaactatttcttggactaatagacacatcttcattggattcactcattacacttgatgataaatcaaaattttcaaatcttggtttgttatgaattattcctttgggagctgattttcttctctttgatatgaaattttcagatggaactgaaaatttagatgttagaaatggaggaattgaattatctaaattttctctcgtgtttaaaggcttcaatgtgatcattaccattgtaactatcacttttctcaatactaaaactattagaatttgaataattgaaactttcagaaactgaacctgatgttaagctattgaacattctatccggagtaataagtaactcatctccaaaataattataattaatatttttattattatttctgtgcaattcataaaaaatatcatcttgttggttgaaatttgtcatatttgactgaaattcaatctgaacttgactttgtgttttaaccagagtttttggaatactttgagtactttcttcaagactcaaagttgtatctgaactaaaataggttaaactattcatcaatgaagaatctgtactttcttttgactcaatgggtgttaattctgttcctacttgaggcgattcgtgaaataacatgtcaacatcgtttaatagcatattgattgattcttcgtattcactattaccctccattttgtgatatttttgttactcaatcaatggagaatagattaaataagacttttcaaaggaagattttagatattctagtagtacaactataaaataataaaagaaaacctaatacatttaaaactttaaatttgacagttaacagcacaattacaatggaaaaactttaatttcttttgattacacaatttatttaaactcaactttaattatattaggttaaacagagtaaaaacaagcggtgttaaattataagaagaatatttcaattaatcggtaatataacagctgggcagaaacgcacttccttagctgggggtataagattactcaatttggtaatgacattaaaaaaacattctatgtatggtttccaaagtatattctagatctttccaaagcagaaaatgggccttctcgagatacgtaaacacagagtaaaatagaaaaaaaatgtaatgataccatatcctaagttagaaatgttctgttttgttctatagaatgaaaaaattattctgggctctattggaaagagtctttgtagatcttattgacaatagattatgtcatattgtctaacttttcgataagaaataccggctctcttccttggttaagcacttgctcccaatctgtatattatgagactataatcataattaatggtaataattacgtaatgagatgattctcattttatttggagccaacttttcaaaatctccggggtttatgcatgatgatgaatgttctgttggttcaaacatctttatagggtttctttgctgggtaaacaacaatgtttaaggcttttacgtcggtatttaagaagaaaccagtagtggttattaatgttacacccgaacttgtacagaaaagacacagattgtcacaaaatcttcaacaaatttacaaatcacaaattgatttgatgaataaatcagtggataatattgcaaaagttccacttataaatcactatatagctttaaatgatcaatataaaactcaatataaggaaatatgtgataaatcatttgaaaatattgattatagtgaagagaatttccttaagttaatcaataaacaattagattttaaagtttcagaacttgaggcaataaataataagataacaattgatgaattattatcacttgatgaaaactataccgatcaaattgatgcttttttctttaagtttcatattaatcgaataaatgcttcattttcattaaaggaatatattttatcatgaatctcttttacagaaacattcatcagagaaaagtactcaacgatgcaataaaatcaacttcaaaaatcttatccttaaacgattatccaattccaaaatttgttataactaaatcacaatcagaattccctgaaatttactgtattgcacctcatattattcatataatgtttgaattatttaaaaatgcaacaattccgtcaataacgcataataaaccaattactattaatattattgatgatattgaaaatgaaaatgttatttatgaaattattgataatggtggtggtatgccaactcaaatgttaggtaaaatttggcaattccattatacaacaagtaaggaaactgatagagatgtaattcatggatttggaatgggattaccattatgtaaagtatttgctaaatttaacaatggttcattaaatttaattaatagacaaggtgatggtgtaactgttagattaacattacctaaatttattgaaaaatagttaattatatagatttaatattatagattgatataatatattataaaaagaaaaagttatattaaacatataaaactctagttcttcttttgataattttatcaatatctttattcttattgttataatctttttcagcttgttcgatttgatacattaattcatttgcatcagtttcacacataacttcatccctaaatatgaaataatcaccttcaacatttaatccacaaataacacatttcaggcaatcaatatgaaatgcttcactaacatcgttttgtaaacattcaccttcaacacctttatgacaaacttgacatagtgatccatttaactcatgaaaatgtgattcacaatatggttgattattgaaaacataacatgaactacctttattgaattttgcattacatgtattacatccaaaacattttctatgccattgacctgtaagttgatgatcctttgaccatattttcttctcatgttcaaaaatttctaatccacatttacgacatggtccttcacctggtggataaataatttcctctgtctgttgataatgaatattatcatcattatcagtattatccacaatatgattatcaattgtttcatcaatattttgttgtttgatttcattttcaaatttatcttcatatgttagatcatgatcaggtgtcgttaatccagttgatggtgattttaatggtggattacttgaaattgaattagttttactatcaaatgataatgcagcatatggatgaacttttgttggtaattcattatctaacggaacttgtttctcaaagtgacgtggtggtaaaactaaattatcataatttggatcattcatatcaaatttttcaatattatctatcaatttagacactggatcctcattttgaccttcattttgataatcatcaatagatgggataacaggttcagaagttggtggtatagtttgattattgttaatgtttggagttgtaattgctgttcttttagtgaaacctaattggctcagtgcattatcagatacttgtggaatactatgggagcttgaattatcaatatcattttcaacatcacccttaacatcatctgcatcattaatgtcttcatttaatatgctatctgattcagtagttatttgaggaatttcatgatgagatagatttgaatgattcatatcagcctcttctaataatgacttttcatttgattcaatttcatcaacttcatttatttcaggaattattaatacaggtggtacccttgatgcattttcaatttcaggaattgatgtattattataatcaattcttgaatcttcaatttcaccttcttgaatcatactcatttcattagagttatctagattaccatcattaagactttgtaaattataaatattcatatcattagttcctaaagtacttaatcttttaacattagtatcttgatacggacttgtaatatctggaactaatggtaatccttcaaattctgttgactgaatatttttacgcatacttgtcagtccgccaaacgaatcttgagaaatattatgttcattatcctctgcggatgccatgaatttatcatcaaatgatccaatagatgcaacagatttatgtgataatttatcattgttatttgattcaacattaagaacgttagggttcgtatcatttgaactaaaataatgtttcagttcttctgtatttgttgttttggtagaatctctattatttgagaatctattttgatttatatcatcattaatttcatcttcattttcagaatcataataaggacgtggaccactaatttgaggaatttgtctaggaggtaatgcagttgattgtttgaatggatcttcgtcaataaaatcattattttctcgaccaaatggatgttcgttatcatgaattataactgaattatctgcagcatctgcatcattatctaatgataattctaattctttatttttatataatgaatctgaattatcagtttctgattcattaccattttgatgaaattgaatatcaggtattattaaaccttcatctttaagatcattagtcaaaggaacagtattatcagtagtagtagtattaaacattgttggcagatttaatttttctcttgcataagtttccatattatttatatttgaatgagttggggaatgattatttaataaattaggagttgatgaattatttaaattatttggattagttgtaaaatttcttgatttactaagatcttgaaattgattattatttaatttatctaatgaatcatcagaattttgattatctctcagaggtaatgtagtatttgttgcaattgcattatgagaataagatcttgattgttttttattatgagaatttaagattttatttggtggtataaatgaaccatttgaaaggtcattatttgaagataaactattaattgttgcattatttctattattcattgaaatacttctatccttttcaggtctataaacatcgaaacctgctctttccataacacttctaactcttactttagttgttaatggggggaaagcagaatgaaatttaactttaggggatttttccttcaagaaatcgggcagagtatctaagtctatttttgactggggttttttatagtatagatttgacatgatggtatatgaataaaataaagcaaaataataatagtagtagcaataatagttgtataaaagtagccagtggtatatgtgtatctatatgcctgaaaagaagtaagtagtaatgtaataaggaaagaagcaataatccacaccagaatcaaaatatcgacttgaaaatcccaattgaaacccaaaaacagaacctaaagtaaacactaagttaatgattcagattccaacggtgctggtggtaaaaaaaaaatttcttttaataataaattattatattttcgcgtttctattgacttttctttatttactttattaaacgcctcgttctttattattattctgcagtttgagacgtttttattgtttgagagtctataattgtttgtttctttcactaaatggattgcttaacttccaatgacgacattcttttgtaattgtaaatagataactaccaataaatataattacgtataattgtatgaaaattgtcattatcatcccaacactacagtaatatagtaattgtgagagatattgatagtatctaataacagtttcaacaatcatcatttcagttacatcaaattcacttgttgatgattgtggtggtgatggtgtaaatgtagataatactttagactttgattttgaattagaggcagactccaaatttaattttgtatcgattataggatcggtgagggacgtgttgcctccagtttcatcatctgaatcaaatattgattgtgtaattgattcactatcaactgtaacattatctgtattagttgcaattgtaacaactgaaattgctcttgatgccttagctggtgagttaattaaagttactggattttgtccagtacctgtagattcatctctttcagcactcattattgaattctatatcttatctataactaatttatttccttttattattatatgctaatgcgataaataatgctatactatatagtaaaattatacacaaataatcaattagaaaagcgttgaaggcgaagaccaggagcagaaaagggtcaattaaagttaataaaggccaagtttaatttttactgagccctctatagtagaaaaaagacttttttttattctcactctgattctttaaagctgagcctcttctgaaagtactgtgttgtttcttccttttgttagggagaatatgatacaacagagacagacaaaggggagaataatgaggagttcgaacacatgttctggtaagtgacagcatatttttatggaatggttgataaattgtgaaataagttgatgacgtgaacgttgacgtgcattatcctgtattgcttgttgtatcctttgagcaaatctatgagcttcctcaatcgatgatttagatgttgagagtgcactgaatggtagtaaagtttcaaatgagtgtattcgtttataatattttaaaagaatgggtgtttcagtaatgtcaaaatcgaaaggtatgttaatacctttgatgaatgaatttctctttccatacatctcaataaaacaattattcaccagtgaatgaattggatatgaattacagactatatctttaaataaaagatatttcacatttctttgaagagtttgaaaaaatgttgataatgagttaaatgaagatattagatttggatcaatatttgtttctattaatggaatttcattatttattatatgatttaaatcatttgaaatattacatacaagtctgcaagtttcaaataatgttgattgatcttgaataattacaggttctaacatttgtaagatttgaacatgttcatcagtcattgaccaatattcaaaatatgatttatcatattcatttttagtagtagtgttgttatcattatgattgaaattattatcgtgagaatttaatttgttatgtgtcattttatcaacaaacaacttctgaaggatattattaacaggttcatattgtgaataagttttttctgtattttcttcattaatcattttcagattgctaagatggtataatcctggatttttagatcctattccatgcattgaatctgtggaaatcatagaaagggtttctggacccttttcaaacagtgatgaacatgttgatcttgcagaagctgtgtttcttataaggttgtatttagtgtcaggttctatatctatatctatatccattgtctatgttaagaccaagaaagatgtgtggtctgtctaaaaatcaaaaaatgaaaatattaacaaaaaaaagaaaatgatctccaaagaatgaagaatgaaaatggaaaatggaaaattgaaatgtcaacaaagaaaacgaagaaggccgcgctgtctcttatgataagagttttgattacattagtattgagattgttatcttaactttacaactatagaatggtatatttatatatatacatacgttatggggaataaggtggtggtgatactgatactgataatgttgcattgtcattatctactacttcatcaatattcaactcatttctttgttgtcgttgatatagtttcacttttaaacgacgataaagtaacatacttaaagttgcaaatgaaagacctgtaattatgaaaacagctaaatcaatacttttcttgtaattatttttatcatcatcaccaattttccttaattgaacacccataaaaatttgaattaaatattttggtgaacaaactgtacatgcaatgaaaaatgcaattggtgataaatgtggtacacatcctaatcctccatttgttaatgaatatggtaatggacaaagtttcattaaaattaaaatgaaaatttcttgcataaatgttgtatcttcatcctttataactgatgcaaataatttaatattttcatttgattcaataatttttcttgataatcccttcaattgatatttgaaaacacataatgaaactgtagacattatacttgatgtaattgcaacaatccaaaatccttgaaatccgtaaacaattccaataattaaacataatgatgaaaatccaattaatggtgggaaacttactaaacttaataatataacaaatacaaatactcctgttgttccactctctctaatacctcctgatgcattcacaattgtttcaatgattttttgataatttataataatgagtaatgaaattgttgtatgaattataagaccacatactacaccaatcttttgcatcaaagttaatgaattaaaccatgtcttcgcacgattgattgcactgtatacatattcatttattctatccatactatacatattggaaaagaaccttgccaaaagaaagatgtaacgtgtttcaactacttgtaacactaaaaatattttttttactatgagactaattttagtatagcattaacttttccacccagctcttctccttaggggttatggtgattcacctcttgatatatcattttagggcggataattgacaatgctaaatgtgataatacagtcgaaaagatatatacttcaatgtcgacgttggtggagattatatgccccaacaaaacgacttaatcaattactcacattgttcttgatttatttaacttatcaatgtattaaaataactattgcatcatttacatataatgaaccattgtggcatataacacgatatagaattggtgaatatttttataaaaataatgatttacaatatttccaaaagtctgatgaatttgaatgggaattagatcatgaagatattagagatttattgaaaattgaatatttgaaaaaattaaaagtttcaggtattgattttgatcaatatttccaatctttggaattaaagaatcaagaagttgaaaaattagatttttatggattatcatttgaagattttatgttaaaatatgctaaaattattgaagaaaataaaatatcgtttccacatccggaaagaacaattactaataaaggagctccagttatttgggatacattattcgttgatgatgcatatagtcgattatctgaaaatgatttgtccaaaataatggaatttgatgaaacatttcttaaagatttaaaactaaaacatgacaatatactaaaatctttaccaattgatgaaaaatgtacttattttgaaggttccggttacgttttcattggaggtggaatttacacttggtattcattattatcaatcatatcattaaggaaaacaggatcagtattaccaattgaacttattataccacatccaactgatagggattcattaatatgtgcagcaattcttccacgtgtattcaatactaaatgtgtgttgatggaagataaatactcaaaggaaacaatcaaaaaactaccaattagaggttatcaaattaaatcaatggcaatattagcttcatctttcgaaaatgtaatgtatctagattctgatgttttcagtgttgaaaatcctgattcactattcgcatctgaattattcaaacagtatggaatgataacatggccagatttttggagacgtacaacatctccattattatatgatacattgaatattcaagttggtgataaaccaattagatttttaaatgattattttacaccatctgaattattgtatcctaaaaaagatttaattaatgtcacagaaacttttaattatcatgatttagctggaacattacctgattggtcaacagaggcaggattgatgttaattaataaaaatacacatatcaatacattattattatcactttattataatatgaatggacctgcgggttattatccattgttatcacaaggtggtgcaggtgaaggtgataaagaaactcttgttttagctgcacatgtattgaatgaaccttggtggcaagttaatacacaacctggtaaaacttatggtacatggataaaggaacgtaattggattgttgatacatgtattgttcaagttgatgcattagaggactgggaaggtaccttgggattagtttggacacaagatcattggagaaatgaaatgattgaaaggggtggttatgtttataattatgattattcattcggtaaaaatggttatgattatttaaatattatgggagaggatttaagcaataagggtaacgattggataccaatgtacgaaaaaaaggaaaatcatcatactaaaccaatgttacaaaagccaagagatatgttttatcatttacatagtcctaaattagatccatggaattatgtattggataatttatttacagatttagaaggtaggcaaatgcgtaattttggtgatttatgggttaaacttggatgggattttgaattatggatctgggaaactgtacgtgaattattatgtgttgataataaaaaaagtatcaatggaatatctgaaaaagatttagaactcttacaattagcagtatcacaaatgaaagctttcaagggtagaaattttgacgatatttgtaaaggtgaaggtggtagattaaatagtcggattgaatggttacgtaaggatggtattaataaattaaaaaagaaggtgaacatcttcatggttggaaattaaatggtaaagaacgtgatagagtaaaaaagatagttgatgacaaatggggtacagattctcgttcacaaaggaattaatagtagtattatttcatataacttttaaccgttgatatataaccttaatgaaacgtattgtaatgttaaatattacgtaatatcatattaaataaatcgataactgcaatctgtaaaaatacgaataaaatgaattcgcttaatgtattaaataactgagatataattaaaatgagtttaaaataataatgaattatattaatatataatactaaatagatggtacgctaggtacttataaaaggttataaaagttaattagagatatatgagggataatccctctatttatagttattcaatataatgtgagtttagcagaatatatgattgtaattattctgtagtttatttattctgtaattgatatatgattgtatttttgaatattaggtaatgatatttttcttgtacttttacacaatcaatttaatcttaatctaacaggataagcaacttatccatttgttcttcgattgataacttcatgagtgaacaagcaccatttagaaatgcatatgagatacgacatgttcaaacaaatgcagctaaatcatgtacaatttgttataaaccaagtgatatagttttaattacagataataaaaaagattggttttatgtttgtggaccacatttaaaagataagaattttgcaaatttagtttattggaacaatgaggggaaagatgttagtagtgaatggaaggaaaaatgtcttgcattggagaaagcaatgaaagaggtgaaaaaacttgaaaagggtaatgaagttaaaagtaagagtagttggttaagttggtctaaagataaggaatctaaggatgataaagatgaaacaaaaagtgataaagagagtaataaagagaatgagaatgataaattatccgaaaaggatcagaaaagtgcagatttggctaattggaggaaggaattagcaggtgctgaactacaactgaaagaatttgaaaaaattaatacaagatatgttcttgatagtgtattttataagggaagacttatgcaagaatggaagcaacgacatgctaatgagattaaggagaagttaaataatggtacattatttcctagtttagaaggagttaaaagtctacgtaaggaagaatgataatttaatattacaattatgttaaaactatattaattaatctataaaaactagaatatttacctatattattaatgtacacctaaaaaccctttattatatacttatgaaaacattttttcttgtttatatttagcaccttttacacctcttaccattaaatccattgtcagagttttagttgtaccatcatcatttggaatatcagcaactggaactgttttaatataagtaaaacctaatttttgataaattttcctatttcttggatgactactttcaagataaagaggagcaccaattcttggacgaccagtttttgtcatatttttagtttgttgttgttgatcatattttgataaaatatcttcatcttcattataataccaagaagaatgagcagattcattatctgagaatgatgaatagcctgaataatcagttaaattatcagaatctaaatcaaattggaaattaaaactttgaatttcactattaagttttgattcttcatcacttgcagatgaatttttagaatttaaaacactattattaccattaacatcaacatcatcttcatcatcttcatcatcttcttcctcctttggttgtttataattatcaacaaatttttgacaaacataatcaactaattttctagctaaacctttacctctacctctcggtattgcaccaatatcagataaataccaactataattaaaatcatcacctaaagtttcagctctatattcatctaataatttccattgttcatcgaaaacacgttttctagtttctttatcagctaaccaaacaaattttaaataaccagcttgatacatactccaaacatatgagaaaagactatgattttctgcaccttttgaatcatcaccactatattttgattttttacttgattttgaagattttttttcaggtttccaaaaacatgcaactgctaaaaatggagcattaggatcaattaattcagcatctaaatctcgaataccaactaaaacacctgataatatagttgaataagttgcagcttcaaataatgctaaattcatttcatttttcaattttgattctttaatatctttcataagataactaatatataaatcttcagcaaatgcaatttgtaaagtacgagcagcttttttataatcttttatcgttaaaacttcaacatgtaaattttctcttgtgtttaaagatacttcaggatccacagtttgttctgaagtattagtggaagtattagaagttgaacttccaaatagggtatttgttatagcagaaaacattttgggcatgatgagaagttcaaagagatgttctaagatgttaataaataaggaatacttcttcttttatatacacccaaacccttagaggtagttctatcaattcaattcaacccatttcttatcgttgatattccgcgatggagaaaattggctttcttctaccgcggtaagtcttagtttgagttatgggtttactctagttgattaatacgtatttctatctttctgtcactggttcttatctgtccatgtgtcggagtagtagtagtagggatatataatgataaagtagtagagtattataatatggattaatgtaattgtagttgtattggagttattttacatttgagtataataatacgacgcgtcttttatggggtattacataatacctacttcatgtgcttacacgatagagtagtgtctgtgtctgttccaaagatcgatatatacatacagtattatacataaattatttagtaaaagaattttcataattatattcataagtagtatttaatcatttacattgaattgatgctctaatagcaattgcaatagtttcttcaacattcttccattcttcacactctccaccacttacaacagttgtaaatgatgctccccatttatgagctaatttcttacccttatctattgcttccttattaccaatatctgtatgtgttgctaccaatactattggtgggaatgatggcataaattttccatttttatgatcgtgactatgactattattactattgttattactattatgttctcttttccataattgtttaattgatgatgaaacactatgaacatcatattcaccaccttgtttccatccttcctcatatttatcccattccttccatgcatcattaattgcattatataatgattttgcaacttctaatgattctaaattttgacaattataacataaaatatatgcatcaactgctgcatttaaatcacttatacctgatgctgtaattaatgtcagtattcttgatctaaatgatgtattatattcatttgcaagattagataaaacatcctttgataatcttgaatcaactgatctttcaagaaatggtataatatcatcacttgaaacacctggtgtatcaactaattcaattaaaactggtgttgaaattggtggtaaatatcgtaattcatcatcttcttcatcattattattattattattattattattagtcataaataacttatctgaaataccaccagggaatgatctacctgctgaattaccaaatgaatgtccaaatgaatgtcctctactaaaagttgcaattccctttggtgaatggaaactacttaatggtgaaaatctatcatcatcaaatataaatggttgtgtataatctaaatcataattaccattagttaattctaatatttttttactatcatgtttattatttattgaaccttcctttaaaagttcaattccacgtttatttataatattaagtaatttatcacttaaaattatttcaccattattaccctctgtccaaactccaacttgaagtaaatcatccaaagttacattaacatcaagtaccgcccttgattctctcctctttggttgaaattgtaacagtattggtgaattacgcaatgttgggtaataattatccaatgataaattatttgcaataattgaaacaatagaagacttcccacattcaggacctcctaaaacagctattctcacgggattggttgatgttgatttaaatatattcttctgcatttgtccagtatacagataacaaaagaaatacctaataaaacaggaaccacagttatttaaataaaataaataaattcaaaatactattaacggcctaccgttcagtaagcaatggttttgtaagcagccagccgtgtgcatgaattttaaatcttgtgaatcattaatcattaataatgcttatcaacacaaaccaaacattcgaatagtaaggtcttagtgttctattacagtcataggatatagatagatggataggtacacagataaataccaccctctgtatgttcctgggacgtactctatatacacctcagctgtggtacgacatcagcattatattacatacaagagatataaacatttactttcagagataaataatatggaatcacctcttttaacagctaaggagagagattcattaaataagaaattaagtaaaaagaaacaatatcaattatctgattcttataattataaatataatccacgtaggaaatttgaaaatattcaagatttaaagacaaaatatggtattattttacaaccacaaccaacaaattcaattaatgatccactcaattggtcaagtaatcgtaaagcattacattttattatattacttttattaactgcatttttttcagctttatcaaatgatgcttcagctccaactgattcaattaatcaattaacttcaatttcttatgattcactgaatgattctgctggtatattgtttgttgcaattgcagtttcaacttggcttttatcacctttaaatttcttatttggtaggaaattagttttatttcttggatgtttatttgcattatttggatcattattatatgcattaattgaaaatgttggtgatgtatatggttcacaaattttaattggattctctcttggttcagttgatgctcatgttcaattatgtttatcatcaatttttttcagacatcaattaggttcaattataactatttataatttagcttattcattaggtacatatttaggtccaatgattgctaattttatttcatttcgtcatgattttagatgggttggatggtcaggtcttattgcatcatctattgttttagtaattgttatttttttgcttgaagaaaattcattcaattattctaaatataataataataattctgaggatataacattgaatttaggttttattcaaaagggaatattaagtaatgatgaatcaaatgatgtattattacagggttataatgatgaaaaatggtcatattggagaagaatatcaatgtttaaaaataattttagagatattgataatgaaaaaaatggtaatcctaaaggtaatattataataacatattttaaattacttttaacaccaatttattgttcaagatttcctgttgttatttattcaggttgtataatgggattacaaaatgcaattttaacattttatttaacaacagaggatacagaattatatgatccaccatttaattattctgctaatagagttgcaataatgaatgtaccatgtataattggtagtgttattggatgtttatatgcaggttcattaactgattattttattctttggattgcaaggaaaaaagatggaattgttgaaagtgaatatagattatattttgcatttgtatcaggattaattggtgcaattggattattaatgtttggaatggggatttcaagaaatttatcatcaggtgttttctatgttggattagcatttatttcatatatgttttcatcatcaaataatttagcaatgttatatattatggatacatatcgtgatttaatgttagaatgtttagttgcagctaattttattaataatataattggatgtatatttacatttgcatgttcaccatggcttgaatcatcaggtattgaaaatacttatattgctttagccgttataacacttgcagtaatgggatttgctggtgttttcattaaatacggtaaaacttggagaaaatacaccaatgtatactatgtgagtctaattgattcacgacagaaacttttgtaatctatataataattaatgtacaataaaataaaagataaaataaaagataataataaacgttttacatcaaaatagcttctcggggttcaataaagaggttcggccgacgtaatgaaattttctccaattacctcaatttggaatgtccgacatcccctattgttatgtatattatatactatcgtgtataatttattattgttgtcacttgttgtcagattggtaatagacattgtataaataacagctatatacccaccttttgacgttgatatttggaaggaaaaaatgtctaggaagaaaggtaagtgtgttggaatacatggtagaatgactgatagtgaaaggacatcacttttgattaatgaaactgttcaaaatacacagaaaacttattcatcaccaactgagagttatacatcagaacaaacatttcatgaagttgtcattcctgaaaacttagctaaaattattgcttctctatggttaggtacattcctctcagcggcagatacaacaattgtttcaacaactgcaaatactattgcaagttcaatgaatggttcagataaacttgcatggattgcaacttcatatcttattacaaatacaattttccaacctttagtaggtagatttagtgatgtttttggacgtcgtactgtgttattggtagcacagttttggtttgccctagggtgtctttgttgtgcattatctactacagttactcaattttcaatttcaagagctcttgctggtattggaggtggtggaatgtctgcattaagttcaattataacaacagatattataccattaagatcaagaggtatgtttcaaggttatgctaatttaatgtatggagttggacaatttacaggtccaattttaggttcagcatttttaacttggaatgaagaatcaggttggagatggatgtttgcagtacaagttccaatggttattatagctggttattttgttcatgttaatgttcatgaatatagacaagatcaacttactgaagttgatatgaatagtagatttgcatgggaaaatttatcacaaattgatttacctggttcattcttattaagttgtacaatcgtttcaatgttaatgatgtttaatgttagtactgtacaaaatttctggatttgtggtggttgctttattgctagttctgtctcttttgcattagttgaaaaatatatcatgaaagttcatataatacctccatctgcatttaaaggtgttttaagaataactgcattaattattgcatttggtgcagcttcaatttatgcaatgaattatatattaccaatttatttacaaattgttcatgatttttcccaatttcaattaggttgctttaattcatttagtgttttcgcaacatcagcaggttctctgattgctggttggtaccttaaacatgatgatgaaaatgttcatgcatctgttattgttaaacgtggtattaatttatctataatatgttgtcttgcaattgctactggtgtcactatttgtatgattacatcaatgaatttaaaaccaactgaaaatagatctgatattgatttaactgtttatggtaaaattggtattttattaattggttcaattatttcatcaattggttatggtgcatttttagttgcattacttattttagttgttggtattgttggtgtgaaacaacaagcaactgttaccggtatgaattatatgttccgttcaatgggacaaagttcaggtgttggtattacacttggtctttataatcataatttaattaatgatttaacacattattttattaaaaaggctaaaccagatggtgatactattttacaaaatttgaaaaattcaacttattatattcgtgatggtctacctaataaatatttacataaagtgttgaaaatttatagagaatcagttagtgatgcaatgattttagtgttcttgttagctgcatttgctttcttattaagtttgatcttaaatattcacaataaacaagaagatggggaaattaatagaaacagaaatatttcacatgtttaaaaggcatgaggtcaaattattatatagattacattccaaatggtatttcaaagaaactattattcaaacattatctttatgaaataataacttgtaaaattcgccaacatcactatctaggatattgaatccatcaattttttcaaagatatcagtaaattcatcattatcaaaaaccgcataatcttctctcagaaatgctaagcagataactcctctataaagttcatatttacctattgatccaagttttaatccccataatgataatgcgcctatcattccctttgaaactaaatctgttggtaatcctccataaccagtgcccaaacctggtaaaataatattatctattttcccatgtatatcattttcaaaaccttcttgatttttttcgttatgtcttgaaacagcacacattatttcccaaacacaatcaaacacaaatctaacaatgtctaaatgcttcacccggatggtatcaatagaatgttctttaaaaacagtatatattgattttggtacacgcatagttggtattaccactattgaattagctctaaatctcttccaagcaactgattccttaaaattggggaaatcatgaaattcaagaatatgtgcagtacccaatggtgtataaccgtgtctcaaatgtttccgtataaaagtttcaattgatgccaactttgtttccttcccgacatttgttgtatataattcacataaagcttcatcaaaaccaccgcccattccaccaatactgttagctggtgaaacaattgtagtctttctattgttctcatgaataggatttaatgatgataatgttccctgatgaacttcaatcgacactgttgacttcaactgaccattatatttcaaaattgactgaatctgtttgttccatgcatttaccagtagaggattgctatctaccagcactatcttcaaatgattcattaatcaatatattgaaagaacatgacatcacctcatcaatttaatattgtggagcatgaaaaattatgtttcggttctcaaccattcccaccaagccccctcctctccatttcttcttcttcttcttcttgatttaatctctgtttattatatctattacttacttgtactcaattagaacaaacaaaacaaagtaaatatgtttgataataatgtggaagggtttaatatttgccaaaaaatgtggtatcagttttggaatccatcaattggaagttttacaactcaaactccatgtcatgaatctcatggaaatcaattctcatgttatgcacaagcagttgcagttcatgcaattggagattcagcaacagtttttaaagatatgacattaccaattgttgataaagtcgttaaatcaactttaaaatatagaaatccaaaatatggtgcttattcagttgatttccatggtggtgaaaactccggtaatgatgatataaattatgatgataatgcacatcttttaaggggtttaatccaaatttatgaagcaactggtaatgaaaaatatttaaatttatgtagtgaaatacaaaaatttatgctaacaggtattactgaacataaacattggcatattaagggatgtaaatggcatatttcaagatcttatatggcaacaatttctaattccgttggtgcaatgggtgcaatgaaaatgattaaatatacaaataataaacaagataaagctaggttatatgattttgcaaaaacttgtatggacttcatttgggagaagatgcgtgatccaaatgataatattataatggatggtgttggacttgattcggagacaattgatataaccaaatatagttataatcaaggctcatcacttagtgcgtattgttatatgtatcaatatgatcaaaatcctgaatggaaggaaaaggctgatttattaattgatggatgtataaatccaggtaaaactctttatgatcgtgattatccagatcataataaaagatatttacatggtattgtttattttaatcaattattaattgaaggaattgttgattatattttaacatttaaagacattgcaccttcagaagttattgaacaatgtaagaatcagttggtaagacatgcttcatattataggaaatattgttttgatgaaaaggatggattatattttatgaatttcgatatttataaaatcaattcacacatttataagagatacagagaagaatttggtggtgataagccatataatccagataaaagggaaagacttgctgctaaggatgatggaaatattgatagattacccgtggtgaagagtttaattggtgaagcagctgctgctcatatgtttttccaaattgctagagtttttccccaaatggaacctgttaagtgttagttagttttatttattttgactttattttatgataattaatagtttacagagagtctatttaatgatttgaacattttctatatatatatatagctttcaaactgaatatttatttaatttaaatgctggtggatttggtatatcttcaagatgtctttcaacaacgacaaactctgaatcacttaatttaccagcaaataatagatctgtgtagttttttagtaaaccaaaaacatttattttcttcagttgaagaagcatgatgtagttgctgttattttagaaggtgaattaatgacacttttaccatttcttgaacgttttttattatcacttatattagatggttttaaagaaggtaagtcatgacttgtatcaaacatacaaaaccaattagaaccataaacacataaacgtcctaaattttcaaagataccaaatgcataaccttgtaatgaaagaaattgtgcaggcattgaatttgaatttttcattgaccatggagtataaatttgaccattttgcttcttatttaaaacatcaaattcatgtactttatgatctaatgttacagctaaaagtgttgaatgacttgagaatgatatacatgttgcaattgatgagagtttgactaatttataactttcatttgatacaagatctaaaatatcaattgtaccatcgtatttagagagtgctactaatgatttagtttcatcaattgcaatatgtgtataatatgatagatattcaaaatttgaacttgaattagatgattcatcttcaggtagatcaaattcaattggatcttgattatcatcaattggagcagatggtgataattgatcaaatttaagacccaataattcattttcggatgtgtagattaaaattaaatcttgattgttgacaaatttagattgtttagcaccaatagctgataataaatcagaattactcttttcgattaaaattttattttcggattcttcaactaaatggaaaagtttaacaagtgataatcttgatacgagtaaatattcaccatttgaacttatatcaacatttgttatattttcaggatctgtaagaatcattttagcaactaatttctttgaattatcattctttaatctccatattttaatttcattcttttgccacataattattaatcttttctccttatgaattattatattaccaataagaggattgattggtaatttgattgaaactgaactttggaaattcacaattgaatttatatgcataattctttcaatacccccactaactaagaaatctaaattcttggattggtaacaagtcattgctctaatatcattaccatgtaataatctatttgacatattaatccatttataattatttttagatattttagtataatcaaaattgtaaatttttctatcgacaccagcagtgaaaaatctttcaccagatgcatccttagctaaacataagacatcagcttcatgaatttggaaagattgttgtaaaactaaatgttttaagtcccaaattttaacagaacctgttgaatcaccagatacaaattgatttgattttggtaaatataacaaactccaaattaaacttggttcacttttagctttatcaattcttaaagtttgaatcaatctaccttaagatgagagatttcattattattattagttgatatagaatcatcaatttgactattatcatcattgtcattattattactgctattattattattattattattattattactattctaaatcattatcattagaataagcccaacatctaattctaccatcagcacaaccacctaaaatcattttattttttatccaacaaagagataaaactctatatttttgtctttgaagaattgtttcatgttccataacacctggaccaccatttatatcaacaattacaactgaaccatcatcacaacctaaagcaattttatcattatttgaattaattgaaattgaccatattaaacctgcattacaatcaaaatttttcaatggaacaccagttgataaatcccattcagttaaaattgttgaaccaccaattgaaaataaacgatggtggtaatgaaggatcattatttgatgaccaaactaaaccttcaattgaaatatctttagaacctggaattattgtctctaaaacccattttgaacgtgaattatatggattccatatttcaattgtaccatcagctctaccaattgctaatctaaaattttttggagtaatttcatttaaatttgattcatgagtgaatgcacatgatgtgatagattcaggtgtataatctacaaatgaacaacgatgaatatccatggttagtcttagtgatggttgattatttcagtaggtacacacacacaaacttttattgttaaattcaagaataatgaaaaattttggttgaagaaatcaaaaaaaaatttatagattgaaatatttttaaataaaaaaaaaatatttttgattatgtaatataaaatacataataaaatgaaaaaaaatattacttaaacaatcttttactgggaaactccccctctatattttcatggggtcaactgggaattgaacccagggcctcctgcacccaaagcaggaatcataccactagaccattaaccctagtaaattttaaggcggtgttaaccaaattgtttaagaaatgtccctccggccgggatcgaaccagcgacctcaagatgtcttgtatgctgtttaagcctattacagtctcgcgctcttccaactgagctacagagggtttctatgatgttcgaaaatgggtgattatcctcggtgttaagattttgtggtcacgtgatttgggctttttggaaaataataataaattcgactatgtgacaaaaatactttaaaaaaatttttttttatttttaaagaaattaaaataaaattcattggtaaatcaaagttattaccaatgataaagattatccattgatttttctttctttaatcttacaatttaaaagggtgtcaggcattttaccaatttagtaccttacacagttacatttacaacacatactttactattaaacttgaatatcaatctcataataatgaaaaagatggggtctaaaaaaatgaaaaatccggtttaaaatcggctttttaaaaaatagcataattgccgagaggttttcaaatggaccctttttattgatgggtttagaataaaataaaggctatattcaattagtttaattataaacttgaataaagaagagggggtacaaaagacacactaaaccagttgagtgcgtatattaaatagatgccaataatagggtttataaaagtttaaaagtttaaaagtttaaaagtttaaacccttcctataattgagttattttaaacggatttcaaacttaataatttcatcccacttctaccaagacctaaataaatttaaatattcatttggttttctaatctttttcttaatgctttttctttccactctactttatacaaaacaaagatgtccgattcaaaagttatagttattactggtgcttcacgtggtatgggtaaaaccatgtcagaaattatccttgaaagatcagaaactgctaaaattgttatggttgcaagatcagaggataaattgaaggaattttttgatttattaccagaaaaagatcaaaaacgtgtccattatattgcaggtgatttaactgatgattcaacaagtgataaaattattaatgaaacaattgaaaaatttggtaaaattaattcagttattttcaatgcaggtattttagaaccaatttcacatattgataaacttgatacaaaattaatgagaagattatttgaagttaattttttttcaattgttgaattaacacaaaaattaattccattattaagagaatcagctcaaaatgatggattcccatcatcatgtatttatgtttcatcaagtgcaagtgaacattgttatgatggttggttagcatatggtgcaagtaaagcatcagttaatcatttagcaatggatttaaatagtgaagaatttaatgtaattagaactgcaagtattgatccaggtattgttgatactggtatgcaagttaatattagagaaaatttaggtacaggtatgaaagatgaagctcatcaaatgtttttagaattacatgaaaatggtaaattattaaaacctgaagttccaggtggtgtttgtgctttacttgcattaaatggtattccacaagaaattagtggtaaatatttagaatattgtgataaatctttagatgctttccaatattaaatttataaatttaatatatataatatatatatatacattatattatatagatagtacagtcaataattcaataacactttattcttatcgatgcattcgaaagatgattaatattaacggtatatattgacattttaatcatacctctgattacataatcaaatattcaatgttatatacaaaatgccatggataatagctttaatattttactctactaattcttccctgctcttgacaatgagtcaacttgagaataaaacaattattgtcactggtgcatcacagggattaggtaaatgtattgttgaaaatattttaaataattatactcatactaatgttgtattagttgcaagaaatgaagaattattgaaatcattttataattcattaccaaaagataaacaatcaagatcattgattgttgttggtgatgttacagactctaatacgattattaaaacaattgatgaaacattaaataaatttggtaaaattgattcagttattttcaatgcaggtataattgagccagttggacatttaaatgaaccaaattataatattgatagtatgaagaaattatttgatattaattattttagtatagttgaatttattaataaattacttacaacaattccaaataaatctccaatcaatttaatatttgtttcatcaggtgcaagtacaagaggtattgatggatggttagcatatggatcatccaaggcagcaattaatcaactttgtaaacaattaaatgatgaaatgttcccaattgttaaatgtattagtatcgcaccaggagttgttaatacaccaatgcagaaaaccatacgtgaaaaatttagtgataagatgacaactaagagtcatgaaaggtttattaatttacataagaataatgaattacttgatggaatggttgttggtaaagtttatggaaaattagcagttgaaggtatacctgagaatgtatgtggtgaatatattagatggaatgaattgtagtatagtatagtatagtacagtacagtacagtacagtacagtacagtagattatgtgtaattagaataaaataaccttgttagatgtgtgataacgatgacctcgtgttgtatcatataggtgtaatcaatcaatcaatcattgtacaaaaggtaccactatagtaacaaaaaagctcggagtaaataaataaggataagcttaaatttgctcatgattaaccatggtggtttaattttcacattgtgtttaattactcttggtattgtattattattatataaaagtagggggtatcccccataatatgactaattatgcttatgaagttgtaaaatagtagtatatattgttttattattaacaattaacaatggaatcatataacggagttttatatagtaaatcagatgcattttatttaattgaagcagcaagaaataatattataccattaataaagcaaagattatcagcatttgaaagacaagcaagtattaaatcgggatcagttttcatttggaatgaaaagaattcaaatattaaaagatggacagatggacgtaaatggtcagcatcgagagttactggtacatttttaacatataaagaaatgaaaccaccatcaattaaggaacaatcatgtcatataattgattataaagataatggacttttaaaacaatcatttagttataatattggtaatgataaatatcatattgttagttatattaatgaaaatgataattcaattaaattacaacgtccatcacatgatattagatttaaaagtttatcaataatttcgtatattgatgaagttattggatgtcaaccaatttatagttcaaaatgtaagggtaaatgtaaaaatttgaataaagatcataaatgtgaaattgaatgtgaaattgaggaagaagatgaagagttgactggttcatcatcatcaacatcatcatcagctagatcatcaatttcaaccagttcaagtgagataactgtttcatcacctaaaataattgattattcatcaagtttagaatctgttactgattcagagaataatgataatactaaggataatgattataataataatggaaagaaaaatgatgaaaaaagaccaacattaccaccattttcatcaattgaatcaattaaatcaattccaagaactgcaccaacattagctaatgtattaaataataaacttgttaatccattaccattaccaatcaatatgaatatgaatatgaataatatgacaatgccaatgaatatgaatatgaatatgaatatttcaagaacaagatctattagtagtataacaccatcagctaaacgtgcacgtattatgtagtattatacaacaatatataactactctttgtattttaatctatataccagtataaccgtttctagaacatcctctttatgcaaagaactacaccaatagcatagccaataatactctatatcattcattatactcccagaaattgtgcggaggatcggagttacttaaataaagtggtagcagttcttttttattatactatcttctttatttatattctttctgtagacagatatacaatgtttaacggtaaatctactatcatcacaggtgctaataagaatttaggtaaacaaactgcaattgcatttgccaaagaaggttcaaatattttattacattatcattcaccatcatctgctgatgaaactgaacaattagctaaattattaattaatgattataatgttaaggcaattacttatagtggtgatttatcacaagaggattcaacaattgaattatttgaaactgcaattaaagaatttggtaaaattgattatgcaattaataatgttggtatggttcttaggaaaccattatattcaacttcattagatgaatataataaaatgtttgatattaatgttaagacatcatttttatttttaaaatatgctgaattaaaattatctgaaaaaggttcagttgttatgttaacaacttctttattaggtgcttatactaatggttattcattatatcaaggtgcaaaatctgctgtttattggatgtgtaaaactgcttctaaggaaactcaaaagaaaattacttataattgtatttcacctggtccaatggatacaccattcctttatggtcaagaaaatgaacatagaattgaatttttcaaaactcaagcagttgaacaaagattaactgccgttgaagatattgttccaattattaaatttattgttaaagatggtaaatggatgacaggtcaaaacttatatgcaaataatgggtttacagctccatctgcataatttaccttattaccctacaatttaacttttataatccttttataatccttttattctatttcattctatttcatttcaattcaattcaatacaaatagcaaccacagcatagcatatagcatagcagaaactacctctcccagtaattataaagatctctctctattaccctttccgtcactctattcattgaccgtcgcgtctgtaggctttttcattctatttttgttatttccatatttatcactactgtaaatacatgattatttgatcttgaatagtggtatatagcatatttatatatttatatcaataaatacaccaattgatcgttactgattggtagaaatggactttgcatatgaagtagatacttttgataataattctaaatcaaattcttcaatttctcaatcaaatagtgtatctttgaaattatcttcactttcaacggcggattttacaaaacgtttacaatcattatctttattaggtggttcatatttaaaatctaataatgataataaagagaacaataataattcattaaataaattattatcttcaaatgcaaaatctttcaaaagagctaaaaattcaattgacttattaaattcattagacgtaaattattcatttattaattcatcttctataaataataatgatagtaatattgatttaaatgatacaactataatacaaagtaaaaatttaaatggtacagttttagttgataaacttaataatatacttgaaagtcaagatggttatgatgcttcaattaaaaattctttatctgtattagaatcaagaattgaaaatgaaattatatctcaaaaatcagtgaataataataataataataatactaaggaaaaaacttttactttacaaaacttaacatctgttggtactaaaggtgatttatcgagaagaaatttaagaggtttaattgaagatgatttaataaatcaatatacatctcaattaaaatcttttaaaaaaattgttaacttattggaaaatttaaatcctaaaattcaacttgtaaataatgaatacaatgatttaattaatcaaattaattactcaattgataattctaaaaatattaaaaatgatatatctcaattagagaaaaagaagaaacaaatagagataaagaaaaatattttaatggcttttaaatcaactttcacaatatctcaatatgaggaacatttaattagatatgctgatcttaatgatgcaacaaatagtatggaatttttcacagttattgataaaattaaaaatattcaaaataattcagatgttttattaggtatggaaaatgaaaaattaggtttaaaaattatgaatcaaatgaataatttacaattaattataaatgaaagaattatttcatatgtccaaaaaaatattgattatgtatattcaggtaattcatatgataataatttaacgaagaatattaatttcccaatatttcaaaaattcttaatttatctttggaaaaataataaagaaaattttaatttaataatggaaaaaatgacagaaactcgtagtagatcaataagtaatgaatttattaataaattaaaaggttattctgatgaaattaatgctcatgatcaattatctacaaataaaaattttaaaaataattcattatatttatcatcttatgataccgttagatttatatctgatacattagcatatgttcatagtttacttgttaatgaaatggaaaatgcaaaatcatttttcaattttgatttttcattaggtgaagataataatgatcaatcatttgatcaaaatgggaaaattgaatttagtaatatgattggtgaaatagtaataaatatagtatctggattaaataattcattgaaaagttcagttgaacatattttacgtcaagagagtaaattatcgacattagttaattcatttgaattgattgaattatattctttaatgtatcataaacttttatattcaaatgataataaaagtactgaagttaatgatggattatcaaatacaatggaatatttgaaaattgaaactcaagatcgtatattctttattataaaacttaaattaaagaaaattgaagctgaaattttagatgaaaataataataataataataataataatattaataacattttagatgaaactgatataattcctgattggatagttgaatggtgtacaattattgatgaattattagggccattatcatctcaaaaatatgatgataataataataatgataaacatgcaattggattaaatgatgaaaagtggaatttacttttggaattattagttaataaacctattgaaataatggataaagttaaaagtaaatcaagtaatgataaaaaacagagattaatatggaatcttaattgtactgattatcttttagataaagttgacataaatccattattatcaacaaaatctcaatttttgaaatcaattattgataaaaatactaatgaattaattaatttagaatttacaggattactgaaaagttcaggattatttgatatttataatttagttaatatgattttcaaattagatgatgaattttttgatgtttcattttatcaaccaattttagagaataaacttttcaatattacaacatttcaaattgctaattcgaaattagaagaattttttgcgaattatatcaatcaaaatgaacttaatggtttaatgtcacctaaaatatttaataaagttttctttgactcatcaatgaaatttattgatttttataataaattatcattgattgttaaagaatatttaaaagattctaatgataatgaaattaaagttttccaatgggatgatattacaattgctacattattaggtatcgaagaatattatcaacaacaattagaccagtaaaatgtatattatatataaaccatattatagagaaaattataaacatttttttacgtacgtacaggttgttgacctctaccataacctttactttcataataatccattggataaaaatcttcattaaattctttatcatcacccattaaaaccattgcttcatatggtgttaataaaggtttattaaatgcataaccccaatctatactcaatcttggacatgcaacttgaacaaatgcatcaatatcatcaaacattgccattttttgtgggaaaatttcacttaaaacaattttaacaactgatttaccattagctttcaatttttcttctaaattagcaacagttactggattaccttgtctacctaatgcacctaaaattataccaaattttttggcatctttagatatatcaattgcttgttgacgtatttcaaccatttgtttcttatcatatccttctcttgtaaattttcttgaatatggatcatatctataggcaggtacttttggattatgaatcattgcagattctaaatgaaatctaccatcaccaatataaatcattgcatcaaattgttcaggatctaaatatgcacttgtacatcctaaaacttcaccctttgataaaggtttaatttgtggtgtataacaataaattaatttttcattatttgaatcatcacttaattttgcacgtatactatgaattgatggattaaattgaattgtaccaaataatgcaattcttgaaccttgatcaaaatttaatctaattgtattaattaaatgtttttcatcaattgcaattgtaacgaaaacgtataaaactttaattaatgtaatatcaattggtacaagacatgaatgtgcataatgaactataaaatcacaatctaatgctctagctgtataatcatcaatacaacatgcaccataactaacatctcccataattaaagtttcacatgaacaaaattcttgtaaaatatctgcaattattggtgcataaattaataaaccttcaggcatttgaagacaaactctctttgcatttctttgtttaatattgaaaactgttttatgaatttcaaaattataatttgatggtaataactttattgcttcattaagttgttcattatttagtatttcatcaggtatttgattaattaatcttgaaataactctagattttctagctctgacaacagttttagatgatgcatctgtgttttcagtctctttagttttcttagcacctccaaatcttgatcttctaggctgtaccggtgttgtttccattatgtttgatacaataagaaacgacaccgattttaatcattaaagttgaaaaaaattatttttttcatgtcaatttttttttttcaaatcaatgtcattagatcaggatatagctttatctttctattaacaagacaaatatagacatgcttacaccacgttttgaactagatcaagatgatgattttgtctatattaaagttacatattgctaatataagattttcagcagctgcaattgaaatggttgttaatgataacgtttttgtattttcattaccaccatattacttacgtttaagattccctaaatcacttgttgaaaatgaagatgcacattctgaatttgttccctaaagaagaatgtattaaaatacgtgtaccaaaacttaataagggagagtttttcccagatttagatttaagtgctaagttattagctagaatgaatgaaccaagtatcgatgataaacaaaaaaaagtttcaatgattgaagaaatggatgttagtaatgataacattgaaagtgttaagaatattgaacaagagggacaagattttgattgggaaatatcccaacaattaccaccaataatgacggatttacaaaaatcagttaaatatggttttaacaacgaattttcagattatttaacaccatcattaagtaacggtaatgatataaatgaattatcagatcctgatcatctacaaccagatgatagaattcatggaaagattaattaaggagaatatcaaatttgatatggaatattatgcaaatgattatattcaatatgaaatatcttgtagatactgaaatgggtgatgatggtattcaaaatgcaattaaatttatatcaccatttactaaaattttcaatgaaagtaaatcgaaaaaataatgttgaaattgaatttacacaacaagaaaaagatcaaatgaatgatttaccacgtaaaacatttttaattgatgatccaaggccattatattatacaatattatgtattttatttgcatatagttatgaaagaagatcatttaatggtgatttaaatacagaatctgcttggactattggtaaacttacaccacagataagttgtttagattcacaattaattcaaagtaataatgaaactgagaaaaatgttattaaaattattgttttaacaatggctagaagagcattaggtttcccattatatagacattatgatttgattattaaatcatggttagatgtttattggatattaagatgtggtaaaagaggtgttttaaaagctttattagaagttagagaattattcagaaaacatgatgtttattatgtttattgtaaaatattatttgataatttatgttcatgggtattaagggatggatgtaatgataatgttttaagaaatctttcacatgcattaaagaaagaagttgaaaatttatcaaagaaagatatagtatttgaaaaaattatacgagatgaaactgtgggaaactgatgaaggtaacgaaaaggatgaaaattttgaatttttgaatcttgaagatattgaagaattagcagatgaagcctatcaacaaagtttatagataatagatgaatgaacgaccgatattaaaatataaaaggtaaaagtgtaaaagataaaagatataaacgagtgtaaaataatatgtgtaaaaatatatgaaaaagaaagactagcctaaggagttttaggttcataatcaataactaatttttgatgaatcggagatacaaaacttgaagtatttgctgtgttagataagttcataaccgaatcatcatcagttataactccatcatctgatgttattgaaacaacttcctttaatggagatcctaaatgttttctaagttcattggtaattaaagttttgtttttctttctatgataggtattaatacttgaagctattaacacctaaaagtttttcaacatcttcagtttcttcatttgaagagggaggaactattactcttattattgattaattgatttctatattgatcttccaggcttgaaattttatctaagtctatatccatagtcctgtaagattcattaaaattattttgattttgttttatataactaccattattatgaaattccatttgttcatattcaggaatggatactgttgaaggtaaagataaagttctttgatgacttaaaccatgacggaaattacttaaattgattgatttcctattacgagtatttctacttaatgaagaaactgcatgagcaccaattcttgaaggtgataattgatgttttggtggtagtaaggttttttttctttgtaatttagagacagtatctgaattaccaccaaatttaaaattagtcatcaaactaagttgttcttgctgtgtatcttgattatttgaatttgaatttaaatttgaattaggtgggaatgtgtaagagttaggatttccactattgcttaactcagaaatgttagaaatagttctatttcttctatgatgattagcccgtacaggtgaaggagaatttgaaggagagtatggactgttcgattgagttggagttgaaaatgcgttattttgattaacgttagcattattattattattattattattattattattattcaacgaggatgatactggattatcattattaaattgagattgagattgattttcagataaatcatcaaaaagttttggaatcaaatgacctggaactttagaaattgcagccaatttcattaattcaattgatctatttaatttttcaactttataatattcttgtttagttttttcttgagatatacgtaattcaagagctttttgaagtgtttgctcagaatatggccattcagttaattttgtaccaaataacactttaaataaattctccattgttgaaaaagctgtagatgaagaattcgatttcattgaaggatctgctttggaatatgatgtatccatttgacaggggttttcagttttactactttgagtattattatttaaagaaaaatctttttgaaaattagaatgagaatgaggattatcttgaccatctaattctgcactatttatattatgcatactcctttgtctattataggatgtcatatgtaaatttttatcagggtgccttagatttggaacaggggaggatgaatgataagttgtacttacaacagtctctgaatccaaattagggaacttgaacattcaagtaatagcttggtagatgaatatggctgttacctgcactaaaaacaggaggaataggggagaaacaaagaagagaagggggggaacaataagaacaaatcagtgtaaaaacaactttaaaatagacgtaataacttaaattatcaataggattacccaattgggaaatattttttgcatttgcctaattgggtgaaaagataaacaaacaaatcaaaactgtagacgcgtctatcacagtgacgtgcgacgcgtctctttattttaattttttaattttaaatattttttacgcgtcttcatttcaattacagccttataatactgcataataagagaattttccagtgaaacttttggtggctggaatggtgtataatcattacgttatacatatcaattaacaataaataagcaatgtccattgtatcgttattaggaataaaggttttaagtaatcctgctaaatttactgatccatatgaatttgaaattacctttgaatgtttagaacaattaaaggatgatttagaatggaaattaacttatgttggatcttctagatctttagaagcatgatcaagaattagattcattacttgttggtcctgttccagttggtatcaataaattcatacttactgctgatgctccatcacctgaattaatcccggcaaatgaattagttagtgttacagttattttattaagttgttcatataaggaaagagaatttgtacgtgttggttattatgttaataatgaatatgattctgaggaattaagggaaaatcctcctgctaaagttcaagttgatcatattgttcgaaatattttagctgaaaagccaagagttactagatttaatattgcttgggataatgaagataatgttgatgattatccacctgttgaaaactaatggtttagatggagatgatgataatgaagaagaaatattagatgatgatgatgaaattatagatatgggtgttaatgcaaaagatgaagatgaagaagagaggaagaagatgaagaagtagtacatgaagattctaaagctgaatctgctaacagacaaaatactattaatgatgatgatatacctgaattgaggaaaagaaaattagaaaatggcgatgaagaagatgcacaaataacaaagaaggcagatataaaagaagaagaagaagataagacagcagtggaggaagaagaagtagatgaagaggaagaagaagatcttgatgaattagaagcggaagatgaggaagaattagaggaagaagaagatgatgaagatgaagatgacgaggaagtagatgaggaagaagaggtagaggaagaattagcagaggaagcacaaaatgaacaagaattacaagaagaggaagaaggtgatgaagaaatagaacatactgaagatttagatggtgatgataatgataatgttgaaacaccattagattcaacagaaggtaatgaaacacctaaaatttcagaaagtacagctacaactcctgataattaaaactgttagaattacaataaattaagttttactatatactaaacattaatctttttcaacatatatcgatgtatttttataattttctttaaaatatccatgtatttatacaatttctatatattacaacttattgatcattttcaaaagcttgatttatgatttgaaaaacatgagtaacttccttttccatttcattatcccatattccaaatctttgaagtcgatgtttcatcttatcgggatgccatcgtatacgttcacgtctcatgttaaggtgtgttttcaaaaactctttcacattgtctttatttagatcatcaatattattactatgaacagggagaggtatagaatcatatccaattcctcgctcgatctcattccaaatggaaagatatcttctgtaatcgtatgtagttggatcactttcctcttcggaagtataatctatttcacatgattcttcacttgatgtatcatagtattcatcaggcttttgttcttcttcaaattttttaacctcttctttatcaaatgcaagaaacttatatccatcttcaccttctccgtattcataaatgatccttggtcttttgaatgatatagttctttaatggtttattagtttctataccttccacatctttattatcttgatggtcaccagaagccaaactaaatttctcccccttctctttcttaaagaacaaccttttactcttgaagtgcttaatatcttcactttgcttatcatccgttgcacattcttcaacactatgtaacttagggattgaaacctctgtttttttttcttcccttttccttctttattctttttggcttaaatcttatccttcggcccctaaggaattcaaagttatcatcactctcctttgagcccaatgtttccatgtagacccaaaaggaaaagaagttaactgtttatctgacgctattatctgtggctgtgcttggcaacatgagttttctattatgtcatgaaaattaaatttcactgtcttgcaaataaaaaaatttatttaaaaatttcagattacaatacttgattttcttattggttatttaccaaccaactagagtcaacttaaatagtaaaatctaatatttgaaaatgctcagatcgtttatacgaactggttcaaaaaagaactttttaagaagtcaaacaatcatacaaaatatcagattgaattcaacaggtaattcaaatcctaaaattacgatagaagatccagattttatctatgaatcaactaagccaatttcaacagaatctacacaattaaattttgcatatagagcatcaggagaaacatttggtcaacttgttcaagaagttcatcatgatagagatccattacataacagtagagttatcactccagaagaggcattagagggtctagatccaagatttcgtgatcctgaaactggtgaatatttagaaggtgcaacatcaaaagatgcaagattagatccagaaactttatgggggcgtgttaatcaaaagcaaatacgtgtacctgaagaatttgcaagtgttatacaaaataatttattgtttcaatatgatcctaaagctttaaaagaacatgttgctcaatggtataccaatattaatgaaacaggtattagagagaaatgtgattctgaattatctgcagatgtttctattgctgcatcatttgctcaagattatgcctgttcatatcaagttattgatgaatttattaaaagaattggtaaggaaaatgttgaggcgaatgttaatagtattttagatgttggttatggaccatctgttggaatgcttgcacttaatgagttaatgggagaggattggaatccaccaagaaaagattctgttgtttacggtgattatcatatgattagaagatctaaaattatgttaagtagacaagttaatgaaaattatccaagacattctgatcaagaaacacatcaagaagaatctttgagtgatattgcaaaggagaatgatgatcagaaaatttcagctaaaaaagctaaacaacaggcagtagaggaagacgaatttgtagatgaaattgaaaaaagctttgttcaaaatcatgatgaaaatttgatgggtaaggttaaaaccaagaatattaaagttaaaactgttttattagacaaactacgtcctgtcactgtcaaatatgatttaattatcatatcttaccaattattgaaatcattagaaaactttcccttccaagtcgatgcacttctaggaaaattactgttagacgtttgaatccagatggtcatttgattataattgaaagaggaacacctttaggatctgaaatagttgcaagagctagacaagtcattttaagaccagaaaaatatgaaggtcaaactgataaattcccaagaccatttaaaagttctgccaagaaactttctgcaagagatcaattaagattatccaaattatcaccagaggaaaaagcattagccatgaaaaatattgaacctgaattacttgagaattttgatattgttgaagaggaaagtgatgctattgaacttgataaaattgatgaaccagttgatttatcagtcattgcaccatgttcacatcatggaaaatgtccattacaattttttgatccacaagtatattcctatggtcaaataggtaaaaaattaaaattctgtagttatcaagtttcagttcatagaccaaagtacttattagagttaaagagaggtaaaaagttagctactaaatggacatcaaagaatagtggtgttggtattgatggaattgctaaaggtggtagaggtagagcaggaggtaatgattatgaaatcggtagttattcctatttgattgttaacagatcaaaggaagatgctaacgtacttgaagcacatcgccaaaaggttcttgaagaaggaataactgaaagacctattggttatcttccacaaaatagaggtgaatattcacgtattcttgcaccaccaatgaaaaagaaaggttttgttataatggatgtttgtgcaccatctggacatcttgaaaaattgcatgtctccaaatcagtcggaaagcaagaatatcatgatgctagaaaatcaaatatgggagatctctggccattaaatttcaaatcgtctagacaatcaactaaggaaaataccttctattttgaaaaaattgaagagaagagagaaaatctcagaaagcaaaagaaaagagatgcaactaagctcaaacgtaagattactaaagaatataaagaagctttggaggcagatattactgaagatgaccttgaagataatttaattcgtatggctaagattgacacatatgaatttttggctaaaccaaaggaagcacaaagaatcactgaaaagcagaagtttaagtactaatcatgctatccacactattcagtgatgaaataacaattgtataatataccatataacggaaagaccttgtaaatagtttatagataagtaattcactgtatttattttatccttttgcttttgctttacgctgagccacctcattgtgccctttctaataaaattgcctttaaagtatgtatcgaatatttgcccttacataacagtttgcttcttttgtataagtgacgagttacatactccagtagccagtaaatgtcacagaattacactgttttatcatgtatgtttaggtagccaggatgcttataagaaatacaactcaatagtttgatttaaatagaccatttactaactttaaaccatgtttcatatagtcggcgatacacccacctgttcgtttttatcctggcggttatcaattggcaaatgtaaggtaattcttgtaaactctaaagctgtaaaagatcgtaatgaaagtaatgtttattggtcttctcaaaaatacacggagactgaatataaaccacattccatttatgataatgttagagatttaacgtcaattaaagatcagatagactttgtatttatgagcggaaatacacttgaagaattattagagtattctacaatgataaaggatatagttgatgaaaacacaataatttttgtagattcaacaaattgttcaaaacttgaagactttgttaatgaaaagttcccaaacaatgttttactaagcattacttcagaagtttttgttaagatactccgatacgacactagaaatgtttattcacatttaggttcaaaagttacaacaacaataggctcaacaatatctaatccttctccaattgtaattgatacacttaaagggtcaaatcttcaagggaaaaaattgaatgatttaacaaatattttacagacaaatggggtatttccttgtagtataattcaaaatggtgttagaccatcaattaatagtttactttggaagcaaacactcacattcataccatttgaactactttccctattatatggagagttagatttgaataattctgtgcaaaactctttaataagaaaatcatttgatgacattttaaaattagcaaatttagattgtaaagaggaattcactgacattgctaatagatccaaatgcgaacaattattcgaccaactactgaaacagtttaatcaatcatattcatcatataaaatcaaatctttgaataataactttttctccgatgaatcaatatcagatatccctcttcatatttataactttgaaaacaattttgaggattttattccaatatgtctagatcaattacttaaaagtgcacttcagataaatgttgatatcccttatatcgaatgtatctatagtttttatttagaaattgaaaaaatcagaaaacagaaaattttcaactggattaaaaagacatcatatgaaccaataaaaccattaataacaccaaggcaacaacgatatgataacaacattaataacggtattaatttgagccatactaataacagtagtactagtgaattagcaatgaatgggtcaaatacaccaattaccccaatgagcaatactgtaccacctgggtatacattttatcctcaacagggtattctgttgccagaaggtatgtcacccaaaatgttccaatatccaatgcttggaaacatggaatatagtaatcaagatatgagcagtaaccccaatatattcaagaaagattataaacagcatccaagattcaaagatattccaaatgaagaggtcaatggtaagaaaatatcctatcatcaaataaagaagcttatttatcagaaaaccaagcattcaaccgaagctgaaagtttgacgcaagctcaaaagcatatttatcaatatgcaaatttaaatcatacatttgagagtgttaataatagatacggatgggcagattcattagatgttttcaaactttccagtgggttcaaggatgaagatgatgaagatgctgaagatggagaagaagatggagctggtcatgatgaaaacaataatagaaacgatgttgaagaaaataatatgacagtagaaaagtcattggataataatgagtctaatacagatgatgctggtatcacagaggtgtcaaaaactgatcaggatggtgggaatagtagtggtagtagtagtgaatctgatcaaataatggaagatgctaatgaggctatggagtgaagggaagttgagtggaatgttgtttctttccacatatatgaattttatcctagattgtttataacttctttttgtaatgtctaagtacttatataaagtatcaagatattgaattttgattgttaaattggataaagaaaagtggaaaaggcatggaaggaaataacggtaaaatagactcggaatttaatagagaaatggagaataccgaaatgtttcaaaaataaatttcaaaaccattggcatgcatgattgcatttcctggatgttgtaattagtacgtgtatacaaagagacaattcctattaacatgaatatgacgcccacagatcaggagattaaaataacggcattgaaagtaatgctacgtgaaagagagagaatagtgcaggaccaacaggcacgatctgaggaacttataaaaatgaaagaaaagattgataactggaaacttgaatcatcacaggaacctgaactgtctcaatttcgagaagaagagatatacaaaaccgaaaagactgtatttgaagatactgaagaggttattaaagttgcaggtattcaaattcaagaagtattgaaagatgtagagagttcattggagggggctgcggatgaagaagttatcaaacttatagaagaagctaaagcattagatgtcaaagaaacatagtacaaactatctataatgtgtgtaagttcaatttgaaaagttaataaattatgtatttaatgattacaaaaaagaatgtaagtatacattaatgaagacttactattgattaagacttcttttattcttagtttcccattcctttaatgcttcctcccattcagtatcttcatctaatggttggttcttttctttatagtattcaactaattctttatgtttttcctcttctagtgcatcccattgatctttttgatcaatccatctttcttgaatatcaatatcttccataaatcccattcccgattgtcgtattgcatcagtccagatagaatcaccaccaagttcattactaccaaagcaatatccgttagctttatctataagtgagagtaaattaatcattgaagttttatcttcaattgctaaaacattaaatgaaagtaaaccaaaatcttcaattaaatctgcaattgattccgtaagtttagcatacttttcattgaaccaacttgtagatctttgattattttcttgtttgacatatggagataagtaatgtaagtcttcaacgtctgtgtagtattgtaacctgaaaggcaaaccaccttcataatcatcatcttcattgtctttttgatctgtattggcgtctttatcaccatcttcatcatctgaatctctattaaacattgaatctctctttctttgttcgattctgttcattttatcactctgtatgtatccattaagaagatctatctttgaaatcacattaatttgaggtaaatccaattgtaacattgatctaagtgctagcaaaagtgaagaaatccaatgtgacgggatagttaaattcatagagtcaactaatgaaacaacacaaagtctaaaatctaaaacctttactaatttcatgaatatgtctctaaatactggactgacggtataaagttcagtttgacctggacaatcaaatattatataagttgaattaccatctctacttaactgaattaactcacgtattttatcaataaaatagtcaatactctctttaaaaatctccaagcaatgaattaaaccaccatttggccctaatctcaaattttcatcgtccataatctcttctaatgtgatgacatctctgatatctaatgtacaatcatagggtaatctatcattagctggatctaaattgacaattaatgaatttcgtccaatagaatttaaaaattgattcataccattacaataggttgacttacctgcccccggtggtccaataacaacttgtccatatggtgccatgttgatgtttccttgttgatatgttatttaaagatgaaaaaaaatataattagtaagtagtgaaaaaaaaatttaagcatgcctttgatttattgccatgcaacgttaaaatcattcttttgatataagaaccaagagaaatatggatcaggaactagctgctattgatggaatattgcataatcttgcagggatacagtacttctatgagcaagaatatcaacatttagaaactttccataagttgatgattggtgttcaatcagagaccataaagagagaactggcaaatgaatcaacaatttttccaaaccgaaacatctaaagaattagatgaaatagtcaaaaaattgaatgctttaaagagtaaaataacgagtattaaaacagatattcaatcaagaactgaatcaaagcaaaaattaataactttatttaattctttgaaaaatattgaatcaataactggtggaacttcaacaaaaatagaaccaagtactaaagttaaagaagaaaaattagatgaacttccaataatggatattagagaagaattagatgatgatgatcaaattattaaaagtgaattgaaaccatattcatcagcagagtcagaattgaaaaaattaattgaagaaaagttccaagcaagcaccaaagcaaatagagaaaaaagaagtaaaaaataataaaactactaaagatgatgatgatgataatgataataatgatgatggaaattatgttgtttcagaaagctcttttagattcttgaacaagaaagagcctaccaaatccagtagaaacaaaaaaaggaacaaaagaagaaagtaacaaagaagttaagaatgaagttaataatggagttaagaataaagtaaagaaagaaataaagaaagaagtaaagaatgcaaataagaatgaaatcaagaatgaaatcaagaatgaagctaatgaagctaagaatgaaccccaatcagttgaacaaaaggatgaattccgtaccattcatgattcgtgaagagattgatgaagatggtaacactattaaaagttctgtctcaagaatccctcaaatagaaaaccagaatactaataataagattgaagagttaaaagaaggtgctgaagacgaagaaatagacgatgatcaattagaagaattatttgaagatatgggattccaaattccaaatgatttacaagaaggttccagtaacgatgctgataaagatatagccgaagttgaagaaattaatgttgaaattccagaaacattatctgttgaaaagaatgacctttttacattagaattgattgctgatgagcttaataacattacagaagaaaattatgactttaaagatgattacggagatatggatgattatgagttacctgatattcaaaacggcgagtattctcatgacgatgatgaagaggaggaggaagaagaatatgatgacgaggatgacgaagatgacgaagtagatgatgaagatgttcaaaaacgtactctttctaacatgtttggaaccaaaggacaaaatctgtttgcacaaaaaataagtgaacttagaaacaaaaaagttggaaataatgttcctgatataaaaaagactgaaactattgaacaagctaccattatttcatcaccttcatccaaaacaaagaaatcagttagtttcaataactacggttgatatcaaacaagtacctgatatttgggatgatttacgtaaatcctaacattgaaaatgagaaaaaatcacaagctaatacatctggatctattttcaagcgtcaaataaataaacctgttgaaaatgaaagttacagaagattcagacgatgatgatgtttcaactaatgttatgaacgatatagttgagagacaaataacagatacaacaacatccagtataccaccaaatattaatgcatttaaaacatttgatccaatatcattaagaaaacaacttgatgaaggtatgagtgaagttgataaaggttcatttattaaacttggtggcaagaaaactccatccaaatttaaattagctagagctgcagaaatgggtaaaaaattccaagagacacatattccaaaggaaactcgtgaacaattacaatcaattgtcagtagaaaaaaagaactgaaaactaatttaaaatctttaattccacccggtacaaaaagtgtaggaaataaaattgaaacaccaaaggatactaacccattacctgttaatccatcattacttgatgaagattatgaaattgttagaaacgatataaccgaaaatttatttgatgatgatgatgaagataatcaagaaaaagaatttcaatcatctaatgtgattgttgaggatgagatacggggtgatgaagaagttgtctctaaagatactgctgaaaagggggataatgatttttttccaaaatatgaaaaagacgatgttaaaacagaatcaaataagatagttgaaacaactatggattataaaactttaggcgatgatatggataccatggcaaaagcagtatgttttatgtttatatgatgatgatttagcaacagttggtgaagttattgaagaattggatgattttgaaaaacataatgaaattgtcaaagaaattgaagattctaaattacatgaaagagtttcagaaattaataacctacaagaaagtaatggtaaaattgaagaaattttagaagataataatccgatggttgttagtgatattgttgaacatgatatggatgaaattttagctgctaatgcaatacctgatgatagattagatattgaattaaatgatgatacattaactacacaagttgcattagattatacaaaaatgagatcaaatatgatacataaatataaaggaggttttaaagaaacagaaaaggaaaaagaatttgtacgtcctgaaggtagtcaacgagtaagtagatttaaagctgcaagactgggtatttaatttaatttatagatataataatttataaattagtttcaatttattacacgtaattgtgtattctcttgataaccatttaacatgaacggactaattccagctttttctaaatattggcttgatgctgatctaatttgttcctttgctttactttcaatcgtttttataccattgtattctttccttgtacttgatctcgtataaattgatgtatcttgtggtattatcttcttagaatcactataaaatttcataacattatcatcattagatatgtcagaatatttagatgaggtaaaagaaaatgagtctatacaatcatagtatggcgtggattctttctcaacaaattgatgttttggtacctctggtggaataggatggatctatcacttcagcactcaatgtattcgtataatctcttaaatcaaattgattgatgtttttaattggtattgaaggtaattccttattatagttagttgttaataaatgattattattttcattatctgtattaacttaaatcaattgaatctgatgaacctgtataacatgaagttggagcatttgaaaaaatatcatcgcttgtagaaataccacctgaaatggttgaattataagatgagtgagtattacgttgaggtggtgttaatggtgcaatatttgatgatggattttcaaggttaaattttgaatattcatcaagtaattttgaaacaagtgaagtttgagaatcatctgggaagttgataaaaagctggttgtttttagtataaacaatatcatcttgatcatctaatgattctaatgaaattggtcgtttttcactatattcagaaacttgatgattcatatcaataaaggtttcttgtttagatagtttcggatatgcattgaaatctgaagtttcattgatttgataaacataattcatagacacaccacgttttgtgttcttacttccatttgaatttgagtttttattagaatcgacatcatttaaaccttcggaaattccaattgtacttatacgtttacctaatttcccccaaattgattcacggtttttacgtttattaatagttggtggttgaacaggaattggctgacattcactatttcttttcaatttcctatattcttgtgataatactctacctttttcattaattttactatctgttgaaattcttttaattggtggtggtatacaaatacttaaatttgaacgatttgcaagtgatcctttgaaatcttcaataggatcaattttatcaccttgatatttcttaccgtacatgttctataaaagagagtcatagatagtagtggggaaataaatgggtgataatgtcttgtatttattgtgaaagtttatcagagatggctgacttgaaaaatttcctatttaggaaatattcattcaagattgtttcatgattgattttagtaaaaagttaaattattggcacaatgattatataaagtttaaaagttttgaagggtcattgattgttcgttttagatgctccaacgtttgtgagagatttaaaaggttctttattgaagaaaaaaaggtgtatacagtcaatttgatttttttaaataattttcgttatcatgaatcaaaagaaatttttcatgcaccaaaaaaaatttatttcatcatttaagatttatgtcacttttcaaagcaatcaatggagagtaaaccatcattagacactcgtttaggacgtgatgatccattttcatttggacaacgtaccttaactaatgaagaagaagttttcacccaaaatgcttgggataatgttgaatgggatgaggaacagtttaatcaatttttgaaaaatattgaaaatcagaaaaataatccagttaatgaatttaatcaaattgaatttaattctaagccaaagaaatattgggatttattctataaaaataatcaagttaatttttttaaagatcgtaaatggttagaaattgaattccctgaaatttttaaatgtttaaaagaagatgcaggtgaaaagacaattttagaaattggttgtggagttggtaatacaatgtatccaatacttgaaaagaataaaaatccaaaattaagagtttttggatgtgattatagtgatgttgcagttgaattggtacgtagtaatgaaaattttgaatcattaaataaaagtggtaatgcatttagtagtgtttgggatttagctaatgaagaaggtgaaatacctgcagatatggaagagaatagtgttgatattgcagttatgatatttgttttcagtgcattaaatcctaaacaatgggaaactgcaatgaagaatttaaggaaagttttaaaacctaatggaattatattatttagagattatggtagatatgatcttgcacaaattagatttaaaaagaatagatatttagaggataatttttatgttagaggtgatggtacaagagtttatttctttacagaggaagaactgagagatatcttcgttaataaaggtggatttaaggaagaaaaaattggtactgataaaagattattgattaatcgtaagaaacaattaaagatgtatagatgttggttacaagcagtatttaaggtttgataactaaatgtataaaagtatcaaaatgttttaatagtagataaacttcccaaattggtgaatcaattggtaattgaataccatgacaataaatattaaaattttctggtattgataatttatcaaatataatagataatttagaattattaaaatttaaaccacttaaatttaattgcttcatttcatataatttaagttcattgacgatatatactttacatggtatatttaataatgaatttgtcaattttttaaagtaagtttcaaaagttttataatcataattaataactgaattccaaaattcagttgattgttttatactcattgacattacaatatttgatgagttatttaatatatagcaagattcttttaacttattatgccaaaatttttctagtaaagaatttaattcactaaaggaggatgagcttgaaatcaatgaagtagatggtaatttagatatttcaattgttaaatctaaatgattaccgtatgcatatatgttatgaagtatatctgttggtattgaccaatctatttctttgccatcaattgataaagttaaataaggaatttttgattccggtatttggaaataattgaaaacttcaggtaaaactgataaaatgtaagaatttctatgtatcaatatgaagacagaattatctggttgtttattttgtttatgaagtgaatgaacatacaatcttagagttcccatactttatctagtattgacattgtgtataaagaagatcgtattaaaagtacagtaaaaatcatggggtctattttttatcaaaatttccgttatctaaaaattatttttaattatttacagattttttatatgatatattttggaattttataataatatgtagaaataaataaataattagataattatataaatgaagatactttagttaatttgaatttaatgaagatcataatcattaaatttataagttcttaataattgcatcagtgaaggatgaagttgaagcagtacctcttaaatcaccagttctattttctggacctgaagcaattgtctttaagacagcattttcaattttatcagcatgagcagttaaacccatatgtcttaacatcatacatgatgataataataaagcagttggatttgctaaacctttacctgcaatatctggagctgaaccatgaacagcttcgaaaattgagactttttcacccatattacctgaaggagttaaacctaaaccaccaattaaacctgatgataaatctgataagatatcaccatataagtttggcataaccataacagatttactatataaagttggatctgaagctaatttaagagaagtattatcaattaattcgaatgaaactttaatttctgggtaatcctttgcaatttcctttgcacaactaacgaataaaccatcagataatttcataattgaagctttatgaactactataacttcatgtctaccagtttctcttgcatgttcaaaagcatatctaataactctttctgaagcttttttagtaattaatttaattgattgaacaacacctggtacaattatatgttcaatacctgaatattcaccttcagtattttctctaataagaactgtatcaacattttcataaggagtttgataaccaacaattgatttacaaggtctaacattagcgaaaagaccgaaagttcttcttaaagttaaattcattgattgatgacctttaccaattggagttgctaaaggacctttaagagcaattttatgtttattaattgaatcaactgcaggttttggaattgttgtaacaccattaattaatgaaggagtaacatcaacaggttcccaatcaattggaacattagcagcttcataaattttaacaacagcatcagaaatttcttcacctataccatcacctttaataagggtaacatcatatctaccatttgattttggagtaccttgatattgacctgcaattttagcagaatattgtctttgagcatttgcagatgacattaataaagtagaattagtcttcttaattaaatttgaatttaaagatctaaacattttaaaagattttaaagggaaaggagtattatctacttgtttaatcaaaaagatttataattaaattttaaaagatgtaaaacagattaatgtcaaaaatagacatagtaatattaaatgggaatcaagaaaaaaaatcaaataaactgaggaaaaaactactattttactaagtaaaaagtaataatttaatctacgggttatattataattattattatggtaatattttctcaggggaaggggcactgtgcgtgtataatataatagtatctactactattgagttactatttctatgtattctctactatctactatctactatctattatactgtataccattctatctaactatgtatctatctaatacttgatacttatactacttacaaacagagccctaattaacaaataataaaataaaataccccggagacgaacccgggaaattagaaatctcacatagtaaaaaactcattttttccactaatgcgttccccgccctcgcatttctacattttatacattcggttccgagttttaatttattttgtatcgtaaagtatataatagaatggtcgttgcgtcgattgttgtggtcacgtgctactcacgtgactttttgtgattaaaaatttatttttaatttattttattttttaaattgtttcatgtttctgacatgaatttgatctaaattaaatataattttgagttcaaatcattgatttcgcccaattgggtaattttacatttttcagaatttcatctattaactatctctaatctataacatttcctaatataaatacactaaaatctatatcatagatttatttttattacacatcactttattatctccatttatttataattttccttctcatataagcaataacaaataatatatcaaatataatgacattagatccagtatttttacctcgtgtcgttttaactgctgctattttaggttcaattattggtggttcaattattgcaacttttttcttatacccaaatttccaattaccaatttattttattgcaataccttggtttcatttagctgaatttttatcaactgctaattatcaacctcaaagaattgatataaattcattcattttagataattatgcttattttggtgctcatttattctccctattggaatattatttagaattaaaatttttcccaaatttgaaaaattataatattatttcctatattggtattttacttatcattatttcacaatttttacgtactttagcaatgcgtacagctggtaaaaatttctctcatcatataaaatcaaatcttgaagaaaatcataaattaattacaaatggtatttatcattatttacgtcatccaagttatacaggtttctattattgggcaattggtactcaattattattacaaaatcccattatctgtggtacttttcttttaccttttggcagatttctttaaaaatcgtatacctttcgaagaatttcatttaattcgtttctttggtgatgattataaaaattatcgtaaaaatacttacatcttaattccttttataaattctcctccaaatgcttgatcttatatatagtcttataaatataactctctattcctctgttaaatcaataacttctttatcaactttactaacaatattcttactgtctctccttggtttaaatccaatcctattaatcttatttttaaattgaacacctcctgcactttgtttaaacattgttaataaatcgtttttacctttcttatcttcaacaacaatcttacgttttttattcattatttcattctctaaatcacctccatttccatttcctctattctctttattatcttcaattttcctcttcttctccttaccttcttctccatcatttataggtaatggtaaaggtaatggtaatgggataggtgatttagtttgtaaattcccacgaatttcattcttcattaatgaattaactgatgatggtaaagaaatacctaataatccattctttttatttttttccatcattaatctttccttcttcctctctaattgatcatgttttgccttttcaatcaatttttggactctatcacttgtactaattctaagtttatcattattattcatccgtattaaatcattactggtagtactaacacttggactaccttctttttcatttataacatctttagtaggttcaacttccggtgtctttctaactgttttattaatatctgagattgatgtcttattattatttaaggattcagttgtagattttgaaattgttggagttataggaatatttggttttccattatcagaattattttggacgacagattgtttaacaagagtattatcaacaggttgggttggtgttttggttctttcattactaacattggatgtaagttgaatatttgctggtttgacgattggaagtggagcaattggtgttttagtagtagtcttagcggtatcattagcatcagatggtttaatagcaacgctagattcatttgttgatgcattggttgatttcgtttcgtttggattagtaacagtctcattaacagctggttcactaataacaggagtggtatcaacagtactaacactgttaatgattgggttagcaattgttgatggttttttattatcaatatttgtattactctgtgttccttctaaaatagaattttcaactggtttttcatttgtacttttattattgttaggttgagtttccactgtattagcattttgaactactggattcaaaataactggtttttctctagctggtatagctgtattcttcaattcagttggtttagtagcagaatcattatcagatttagtggctgaggcattgataacttgattagttttctcagtaacggtggctttaggagcactaaaaacatcaactattgcaccagtttttgaaatttgttcaggagattctctagcaataatagcatcaaacacagatttaacattattggttagattaggggctgaaacgggagatactgaattttgaggggttgatctcttggaatttgaattattttggacttcaaaatgttgaacattaggtttaaaataaactttagtattgttattttgcatggaatttgaaatttcatttggattgtttgcattagcattgtaataaatgttttgaactctactttgaggatttgaattcataatcatagattgttgttgttcaaacctctgttgttcaattcgttgttgttgagctctttgttgttcaatacgttgttgctcagctctttgttgctcagctctttgttgttcaatacgttgttgctcagctctttgttgctcagctctttgttgttcaatacgttgttgctcaatacgttgttgttcaatacgttgttgctcagctctttgttgttcaatacgttgttgctcagctctttgttgttcaatacgttggtgttcaatacgttgttgctcagctctttgttgttcaatacgttggtgttcaatcctttcttgagcaactcttttttgctccaatattttttccaaactattttgttcaactttttgttgttccattctcatttgatcacgtaacagttgttgagctgattcccttttctcttgttcaattctttgatcttcaatcttcttttgttctaacttatatattttatcttgcgcttgatattgttcatagatcttatttataggattagctgggaatgaacccgaattagcattggatggggaggaatggaattgtgatgtatttgatgaattcgatgcattggaactataagtattggtagcagtgttaattgttgggaataaactagatgttgatggatcaacattctgtgtttggggtgtattcatattttgaacatgtgcgttatttatattattcatgttattcatattattcaaatttaaaacatttgcattactaacattttgtacatttgagtgattcttattagtagcattattcatactattatttctactaacattggttggtataacattttcaatatttccttgtaaaactgttgaaaatttacgatcatcaaattctaaaagtttctcctctaaaaatctaatttttttaatttcttgactatcagtttcagaaataatattgaatgtaagtccataacctgataaacttttggttaatctaatcaacgataatttgaagaacattgatgatgaaggattttggaaatcatcaattaaatgatgtctaacttctaataatgcattactaagtttgatgcgtttatctaaatatgttgaatttgttggtaaatttcttaatcgatccaattcctttgaaaattctgaataaactttaaatgatgcatcatgaaaatataactttagacaataatcattgtaaatatcagtttgaggttttaatttctttaattctgctctcatgaatctatcaattgtaatacaaaaccttttttcacgtgaaataacattctttaatattaaacagcaattagagaatgcatatgccataaattcataaatagatttagatgaatcattatattgattaagcattatatcaggaaacccgagattattaacttttaaatccaaagctttttgaaatagtgtatttcttgtattcatatctgaatgaacataactttggtacattttatttaaagaattaaaggtttttgttatatgctccatttctttggaaacagattcaaatttttcattactgttcgtaggttttgacttttcttgttcaacactggaggttttttcagatattgatgattttgcttttgatatccttaattgaatttgtgcatattcattagctgattgttgaattaactgttttaatctttcataatctttcatttttgattccaattgattggtcactttgtttaatgtttttactctttcatgtatttgtttgtctataaagtacttatcattttgatgggatgaaggggctgtcagaggaacagcttctgcagttaccgttgatgatggtgctacactttgagtggttaaagcatgttgtacagatgatgccagagattcgttaatattttgaaaacttggcgcactatttgaactaaaaggattttgtggggatagattaacaacagatgctggcggagctgatgatactggtataacagttggcaaagttgatgcttgaactgttacaggtgatttgggtaatgtttggacattacttgaaggattggaaacgataggttgttgagctgttgattgtgtagctttatttgaattttttaaaacattattcaatgtttgttgatggtaatgtggtggttggtgtggttgttgggcttgatgttgagattgtgagtgtggtttggggataattggggtttcatttcttgtatttgttacatttgttgttgcagttgatgaggtcattggttcatcatcatcagatataatttcaataacatcattcggtactggtattgatggtttaggtttctttgcaatatgatgagtttcagttgatggagcagtatttaaaactggtttttgacttgatattgttgatttattatctgatataacatgatgaacttcattatcttttgtaaaatgattcggcacttcaacatcaattggttttcctgatttatcataatctacaagaattaatttcccaatatcattaacaataacatcttcctcttgttttactttaatatttgaatttggtttagttgaactcataattgagttatttgaatttattttagatggattaattgttgcatttaattctctttgaggtatataagaaccatcattttgaatttcgacataatcgtattgttcacttgtatttttaataattgaatcaaaataatcatcaattgctaaatgtttaattttaattttatttgtacaaattggacatgtaccaactggtgctttctcctgtaataataaataatattttaaatcaaagcattgaatatgattacatttaactgaacgtacaggatatttcattctaacaaatgaacatggacataataatgataaaatttcctttgaagtggatatatcatcattttcattttgctttttaatcatttgaatagtttcatctgctgttatatgaggtaaattcactacttgatcaacaagtaaatcaactttatttgttctaatgatgaaaaaataaaatttatatttatattccgcataactatattttatcattagttcatttgtaccttttttctgaacatagggagttaaattaaccggtataacagaagattttttaccctttatacctttataattagcatcaacttcaacattattaactaaaatcctacaaggagttggaaattcaatatgtttagcatctttgaacctatctaaaggacttgcaagtgcagctaaaatataatttggagttttcaataattttctctccttttcagttaatgaaaatctaaaccgttcaacgtgtgttactatttttttttcatcaacaggtactaatctatcaatagtgaaagggttattaccatttgcttctattttctcaattatatcatagtaaactgatcttttaaatacaatttctctatcgggtatttcctcatcatttaatggataagttatagttgtattatttttaattgaatttgaaacttgacttgcaagtaattgaaattctggtaattctaaatcttgctctaataattcaattaatttccttgttgtaaaaaaatttactttattatttttattctttgcatcaattaagaatagttcaattgaatgtgtcaaatctgatttcctcttacttgcagctgttaaactcaaatttcttaaaagtttagaaacttcataacttttcaaattactcaatcttgtcatgacatcctatataatgatttcagttagtattttgttatggagaaaaaaaattgaattttgaaaaaagaaaggtataatcgtgtacatacttgaaaaaatggagctatatcataaccggagctcacaggatccaaggctgtattgtttctagccagggacatgtctaaataagggtgatatgagtatataaagtagattaaaagatgtacaaaaacacgtaataatttaattataaatccaagatccccataaacaacccttatccaacattgaaagggaaaatcatgttgaaatgagcgtcactgcgaagggcgaagaaagagagaaaaaaaggggacgaaattgctatgacagtgttaatgttgtgagaaaaaaaattttccagtgagtgagtaacctattacactgattcaacgtttattaaatggacaattggtatttaaaggtaagtgtttcctcttgaaagttgtttgtttgtgggaattagtatttcttttacactgattatttatcttttatgcaaatgtcctctcatgcatctcattctgtttccaattctgcctcagttaatgtttcaagtgtaacagatgctgcttcaattttagctgctaataaacttgaagttttaattgaaagatttatttcacaattaaagagaagacaagttacaggttcctataatgtcgcaattgcaacttgtaaatttcttatgagagttacatcaatttcaagatggaatactgctcaagaatttatcactttattaagattaattggtaaaaaaataactgatgctcaaccaagagaattctcaattggtaatattgttagaagagttttagcattagtacgagatgaagttaatgttaaaataccatctactgttgctacttctaatgaatcaaatactattgcacctgttaatacttcaatgtttcaacttttagttacaactggtaaagaaaaggaaaacaataataataataataataatacttctactactacttctacctccacacatagtagtaaatctgatttaagatccattataattcaaggtatacgagatttaatggatgaagttcaatcagttcatgaaaatattgaattaatgacagttgatttaattcacgataatgaaattttattaactccaacacctggttcatcaacagttttaaatttccttcttaaggcaagtttgaagagaaaatttacagttttaattactgaaaattatccaaatgatattgaagtttgtcatggatttgctaaaaaattagcaaacgcaaatattgaaagtgtaattatacccgattcaacagtttttcgctgtcatgtcaagagttggtaaagttctaattggtgcaagatctgtttttgctaatggtggttgtgttacagctgcaggtgttgcaacagtttgtgaatgtgcaaaggaacatagaacaccagttttcgcagttgcaggtttatataaattttcacctggttatccatttgatagaaattcacttatagaatttggtaattcaggtaaagttttaccttatgatgattgtgatttagttggtaaatgtgaagttacaaatccattatatgattatgtcgttcctgaacatattgatatttatattacaaatattggaggtttttcaccaaattttatttatcgtattgttctcgataattataatactgaagatgttgatttatcataagaagaggtgacaatgatatgttgatgatgttgataattataaaaaattatactgtatattacaattaaaaatatttcaatcaatgaaagtttttcaaatgaacaatgttatatgaggaatactaataacattgtcactgactgccctctgcctcgctcggctatgtttattataatgcatagtcttgagctggatacttttctaatatttttaatattaataagtaatgggctatatcaacttttagcatgttcaactttgagtgcgctttcaccacggctagcccaatggtgaaactgtaattatcgaacttgatatttcgtaagatttaaattgtaatttgtaagatgtaattagtaactaggaccatattgttgggtaaatcatggtcttctgtcttccttttgaaaagctggttataaataaaaacggctgtgccttaactccaaattattatttatttttcacacgattttacttttctgtgataaatgattcgttccgactttatgtcttttctttaatcaaacactagtatagagatggagaattatatcattacagcagttgtattaatagttattctatttgcacttaagaatatattatttacgaatgttaataatgttgatttagaattagaaattgatcctgagacagattcatcaaaaacggatgatgtaacagttatacgagattttacaccaagggaattatcaaattataatggatttgatcttgaaaaaatttatattgcagttaggggtaatgtttatgatgtctctaagggtagacaattttatggaccaagtggaccatattcaaattttgcaggtcatgatgcatcacgtggattagcaatgaattcatttgaaatagaaaatttaagatcatgggatcaaccaattgatgaattagatgatttaacagaaattgaattgaaaagtcttgatggttgggaaggtatgtttaagggtaaatacccctgtgttggtaaattagttgcagatccacaattcagtaagtagattgtgtagtgtagtagtgcatgtcctatatgtagattattacgtaatatcgggttattttctatcatgaaaaatattaagtttaattaatggaaggttgtaaatcgatgtttgtataattgactgaactacatctaaagaagaagacctttatatacatacaatgagtatagttcctattacactcgatagtcttacagttaataatttgggagtcttcaacaagattacatcaccaactgaatatccaagttcatatttagataaatgtagagagagtggagaattatgtcaatatgcatatttcagtgaagtgccagttggtgtaattgtattagatacaattattaataagactcccattgcattagaaatttcacttattaaagttcttaaatcatataaattagaatttaatgttgaaaaaaaattaattcaatatgcattagatcttgcaccaaagagacatttaagttcagtgtatagttcaaataagttcaaaagatacacagttaatcaacatattcagagagatgggatttgctgatgatgatattaagaaggatatctactgcaatgtatcatcaaaaggtgaagataccattttaatgaccaaatcgcttacgtaaggccatccagaagttccgattcgccactttgaaattttatgatggttagaacacagccgtgcatttttatatcataaattacacagtttatcattaccagaagaggaaaatctatgattgaaaatagttgtatagttataaaagttgtatagttgtgtatatactctgtttcttcatctaataaacagttcatatagttcagtatagtatagtatattatattataatataatatagtaatagattaatatactatgaaagaaataagtacatcaaattggatgtctcatataagtgatgaaacttttatttcatcaatttcaattgctggtactcataattcagctgcttgctttaaattatctgctccatctgttcaatgtcaaggtaaatcaataactgatcaactaaatcatggtgtaagatatttagatattaaattatcaaaagattatatgtcaagaggtgaaaatgttaatgatttaatgattgttcatggtaaattcccggtaaaattaagtggttcatataaatttaagaaagttttagatgaagtatataatttcttaaaattaaattcaactgaaactgtactaatttcaataaaatttgaaaatacaatgcttaattggaatgctgaaactgatgaatttgctaaaattttatttcaaaaatttattgctcataatagaaatcgatggtatctttctgataatataccaactttgaaatatgcaagaggtaaagctgttttattaagacgtttcccagtaattgaaaatggtacttataaaaaatttggtataccagctctttggggtgatgatattaaagttttcaataatgattcaatttgtattcaagattataattcaattaaaaattcctctgatttaaataaaaaagtagaattattcaaagatgtaattgataaagcaactgattatcattcaatgagtcgaataaattcaagttcaaactcaaaatctatttcaaaatctacttcaaaatcttcttcaatttcaaattctccttcaaatagtcggcgttctagtaattcaacaactaattcaacaaataatacaacccaaactgataattctaaaaattccccattttctccatcaaattcaattgtttcatctccaaattcttcaagaaaatcatcaataactggaaatactgatgataataatactaacactaataccgatttcaatgcaattaaattaaaagacccaaaattatttattaacttttgttcaggtgctaattatttacataaaagctattggccttcaaatgttgataaagctttacgtaaatttaatattgaaaatcatttcacaaagaattgtggtataattgtatttgactttgctgatagggataattggaatttagttaataaacttatcaaaacaaatttccaataaataaatgttgttaatcaaaagagaaaacaacattgtataattcttataaactttatagtagttttagttttaattaactttacttatatacctttcaaacaatcaaaaattataacaaagtatatttgacattttattaacatgtgcaagattaatgtccagagtcagtaccgaagtcaaaaaaacggttacgaaattaacttgaacagaaaaataaatatggtgtaaagaaaagcaaaaaaaatcgtcacagacaggattcgaacctgcgcaggcaaagcccaccgccttagcagggcggctccttaaccactcggacactgggacaacttgattgcttctactaaacatatttttgttctcgtgactttgttaattttcaaaatttttttaattgtgtttttctgttagatctgggcagttttcagcaactttaaaagactgattatagcgaaaatatttgaaagtttgttttgtgtgctttaaaagccttcaaatttaaaaaatttattagtctttcacaacctaaaattatcataaaaaatcagtaaatggtaactttacagaatttttttgcaataaataaagttacttagccattgaattacagaactccaaaacacggaaaactttcacttatatagtaactactaaacatatctaaagtacgccatgtcatgatcattacttactacattttataacaacacataagaaaccatttaaagttcttttattttataaaaaaaatatccataataaacattttaactcaaacgagctgtatatataacccaaccagatatcataaaacttcaataatatcataaatttctgaaaaatcttcaataacataatataattccttacccgtatgtttaacagttatccaatatttccctatttttacgtgcatcttcaccatttaaataaacaacacaacctttacgatttagtcctgtataaactttattaaacagtttcaataatctataatattctaatgaaatagatcgttctcttgttaatattatgaatttttcattacaatgcagctttttcgataataataagccttttaatgattgtaaacttttcatatctgttgttttatcacctagtaaattcttagatttcagaatacttatatcttttattggatttttatgcttattatttcaattcattcattaaacacatataatctaatgacggtattaaatttaattcattatccttttataattgttatatcatttctttcattaagattctcaacatttttcagtttactgaatatttcttcattaatattaacattgaatcccagtcctgtaattatacgtcttattaaatatgaatcatttgtaaatttacttaatttttccttaacagttcctgtaaacattagcaaatggtacataaacagtcttaattaaatttcgaagtattttctccttttgaagtttactcatattttgatttgtttgaaatgatactttatttaattcatctttccatgatttttcaataacttcatagggtatattggctagcttctggaatttccttaactataagattttgtactattttgaataaactcaaatcttcacataataatttgtcatgaacaaataaatgacatggtgttctttgaataactggttttgaatccatccagtttgttttaatccagtgtttgataatactatcgaattcacttttagatcctttagtaaggttagatgttgcaaaatcagttgttgtagtaagtttcttattcttcaattcatgatatctcttactcatacttttaggtattttttcaaaatctgatgcattactagatttcttagattttacatccaaagatgggtgatgataaacacctgtaattgtatctttaggatattgtgcatttttcacaactgaactatgtcttgaacttgtcccattgagaaatttcttattatttgattttgaaagatgtaataacttttccttcatgctttgaaagctggaatctcctgagcctttcacaaaacgtactaccggcgttggttttaacatggttgatgagttttgagatataaagattaagcaaagaaaaaagggttgtgtatggggaaagtgtgcaggatccgtaggtgaaacttgaagagaaactttaaaatttccagaatttgcgcattttcaagggaccgataaaacctgtgtgatacatgtttcggacagtgcattcattatgttaataatataattatacgttgtatttacagtaagattataggttagttataatatataagttatatatgataagaatttagttaagaatattaaagacattggatttattcaagttgattatcagctctcttggtttcctttaacttgagtaattgttcaataacggtatctaaagcaattgcttcattcttaccttgtaagtcttgaatatctctgtttctgatattaacagatttttcattagcttcttgttcaccaacaatgaagataaagttgtatttttgaacttgaccatttctgaccttcttttgtaaagtattaccagtaacatcaacatcagcatagaatcctgctgcatgtaatttttgttgaacttcttgtgcatattcattatatttaacaccaactgggacaactaaaacttgtcttggtgataaccagaatggccatttacctgcaaaatgttcagttaaaattgctgtcattctttcaacagaacctaaaattgctctatgaatcataacaggtctaacaactgatgaagtatcttccttgtccttaaattctaattcaaatctatttggtaattggaaatctaattgaatagttgcacattgatgccatcttcttaatgcatcagagatcataatatcaatttttggaccatagaaagcaccatcacctgcattaatttcccatgcaccaccccatttatttaatgcttcttctaatttagcttctgcaccattccaagtttctaaatcaccaacatatttttctggtctagttgataattccatcttaaattcaaaaccgaaaataccataaacatgttttaagaaatcgaaaataccagtaatttcatcaccaatttgatcttgagtacagaaaatatgtgcatcatcttgttggaatcttctaactctagttaaacctgataaagcaccagaatattcatttctatgaataacaccgaaatcagcaactctccatggtaattctctataagatctttctcttgatttgaacattaaacaatgacctggacaattcattggttttaaaccaaaagtttccttttcgacatcaaaggtgaacatattttccttgtagttagcccaatgacctgaagtttcccataatttagcattatacatatttggagtaataacttcttgataacctctaatttgatattgttctctcatcatatcaactaaagtattgtaaattctagtaccatgaggtaaccagaaacaagaacctggtgacatttcatggaagaaaaataaatcttgttctctaccaagttttctatgatcccttgaagctgcttcttctaagaatttaagataatctttcatttgttgtttatctgggaatgaaacaccataaactctttgtaaagaatcattctttgcatcacctaagaaatatgaagcagaattctttaaaactttgaaagtcttaattctaccagtatgaggaacatgaggacctctacataaatcaattaatggaccacatctgtaaacagttgatgaggtaccatctggaattttacttttgattaattcttgtttatatttgttatagttgaacatttctaataattcttcctttgtcataactaatctttcaaacttttgtttatccttaattgctttttgacatgcagtttcaatatttttaaaatcagcttgagagacaacagttttaccatcatcaatagccatatcatagaagaaaccatcttcagttggaggaccaaaacataaatgagcaccaaaatgacattcacaaccttcacctaaaacgtgagcagatgaatgccagaaaacagctttaccttcaggatgttcaaaatccaagaattctaaagtacaatcaccttctaatggtctttctaaatcccataattcaccattaactttagaaataacttgtctatcagagaatgatttaccaatttctttagcaatatccattggtgaagtttcatatgatgtaccttccttaacagtaccatcctttaaagttgccttaattggttttctttccattgcagcaaattcagcatctctcttagccttaatttgttcaaagattttaactctgtgatcgaaaaattcaggttctggagataaaaagacaggtcttgttgactcaccttcctttgctttcttttctttctttggagcagcctttttaggtgcctcagccttgattgataaatcttcaaccttttgttgaacttcttcagcagacattatgcgattaagatttaaagtgacttgtcttagaggaaaaataagatacaacagtttattataattatataatattgaaataaatttaagcattgaaaaatggaattcggtgacaacgtagaaaaaaaaaaatgtctggagagagggttccgggtaagcttttttttcgttgcatgaatttttttttattcttcagtacaagaaagagatcattttggtagagttacaccagtgcaatgagtttcagagtgatagaggacgatggtggagataccgttacaaacgtactctctagaacactagcagaagaagatatgattgctagattagagaaaaatatacagaaagagaaacaaataaccattgcaggtaacaccaatttatcagacaacgatgatgatattgataatgaaagtgatgataaacgcaaggctaaaagacagaaaatggccaaaaagaaggcaacttccgaaaaggaaacagatgtctcatatgctccaacaattgatgaagttacaactaataaagatcatttagctactttaagaggtgagggaagatattttggtgtaactgaacctgatgtcaatgaacctgtctgttcaaattgtcatagaagaggacatagacgtggacaatgtaaagttgttgtttgtcatgcatgtggtaaagttgatgatcattatgaaacacaatgtccaaattcaatggtttgttcaaattgtggagagaaaggtcattttaggaatacatgtccatctaaaaaacatcaaacttactgtgttgaatgtgattcaagaagtcatgtaaccgagagatgcccatcaatatggagaagttatgtattgaagcctcgtagtgagaaatctaagatggcattcccaactggtgctatattttgttataactgttcagcaaagggtcattacggtgatgactgtcctaaaatgagaatatcgaaaacacctaatattaatggttctgcattttcaggtgaaaatttaccaaaagaattagttggacagtataaaaattatcaaaattctaacagatacgatgatgattcatttgatccaaataataggaaaagaacttatgataccgctaataatacaaattataaccatgcaccaccaccatatccaagattcaataattatagcaatggtaataataataatagttataaaaacaacaattatagaaacaacaacaataataatagtggatatccgaaaggtccaactaaagtaggttatatacctgcaagacctagttcacaaaatcaaagaagaaataacttctctaatagttcaaataaaaacacaggtaattatagtaggaataataatggtaattatggtaataacaataataacaacaataacttcaataactataattccaggtcttcatatttcaataataataataatagaaactatggtcgaaataataactattcaagatactagctattatatccataataataacaactctcctttgtatatgtataactttactattgtatattctttataaactaacataatttcaattgttactttctctgtgctgatgaatatggtaactccgatttattaaattttttatttaactgttcatatttaacttcattcaaagttttcattctccccggtttaccaccctttagcgctacaaacattggatccattgccattgccaaaatagtgtctgcattcttaatatccttgttcatagctcagtattttctggtataaaaggaagaagtgattcagagatctattaagtggaaaaattgtgggaaattctcgaattcaatggtgtctcttctttatgacaagttctcttttaatcaaatttttctaagtttaataatctacaattgtacaaagggtaactttaatttaatttaattaaataaactataaatctaaaatttttcattgccttcaaccacactatttattttatgatgaatttcagcaaattcatttgttaattcaacataaagtttaaattcttcacgtaatgtattgacaatcatttctaaaccaccacgagaatcaatatttgatggtatgttattttgatctaaatcattaacacaattttcaacttcttgcagtattatttcatatttagaaattttaccactaaattcttcaattttatcaacataataagaatttaatacctcagttatatttattgatttactattatgttcttgctgtgtttgcttttgtgctggttgtgaagattctaatctgttaccactaaccccaatgattactttagatgatccttgtaaatttccttgatcattgtttgaacttgtcattggattagttaattgaaggaatactttgattaatttctcaacccaattattaaaactttctaatgttttacttttaaaactttcaacaaaatttaaatctgctgttaatgcttgattagttgatgcatatactttttgtaaataatcaatatctcttggaacactgactattagctctttatgttgagattcttgatctttcaaatattcagcaattgaaacttgtgtttgaatatattcatctaattgttttagttcttcttgaaatgctggtggtaaatcagaaactttagtcattgcactcaattgaggcatgttgttgttgttgttgttgttgttgttgttgctgttgtgtttggaattgattgttgttttgttgaccaaataaaccaccagttgatgatgcaggtactaatgagtttgaattaccaaataaaccaccagttgtaccagttgtagttgctggtttagcaccaaatgagaactgactagttgcattattactaccaaataatccaccggtagctggagcggaagttgcaggttttgcaccaaataatccaccagttgttgaaccagcttgtgcattgttattaccaaataaacccccagtagaggtacctgcaggtttagcaccaaaaagaccacctgaagtggcagtggttccagtagtagcaccaaatgttcctgctggtttattaccaaacaaaccaccagcagctgaagttgctgatgtgttattaccaaataacccacctgaaggttgtgtagtagctgtattattattattattattgttaccaaataatccaccaccagtagttgaagtggtattattgttattaccaaacattccaccagctgcaggagtagttgaggcattattaccaccaaaaagtccacctgtagattgtgtattattattgtttccaaacaaaccacctgcacctgtagctgcagcaccagtattattattgttatttgtaccaaatccaaaaccacctgctgtattggtagtattggtgtttgtattattattattattattattattaccaaatccaaaaccagttccagtacctgttgtaccagctggtttagcaccaaataagttcccacctgtattacctccaaaagaggtagcacctgcattgttgttattattattattattattagcattatttccaaacaatccaccagttgaagcaccagtattattgttattgttcattccaaatcctccactcattggttttgaagcaccaaacccaccaaatccagttgatcctgcacctgcacctgcagtattattgttcatagtattattgttattgtttgcaccaaatgaaaatccagttgaagtagctggtttattttgaccaaacccaaatcctccaccagatgacgcaccaaacatactgagttgatactatccaatgtatattatataccactgtcttaaacacctacactgtgtactgtcaaaagatcaacataaaaagaatcatacagagagaaagtgtgtcagaaaaataaaatttcatttggtgcactgagggtggcaaaatggtgtatgttgtcgaattcttccactgggaggcacattaaaatggagttggtgataagtgctcgtatttcttttgggtttctgttttgtgttatttaatccatagacaattaacttaaactaagagtattatatatcacaatgggtatgttacagaaataatcttattttttcccatttgatcaacattttgaatcgaatattaacatttttatattacaggtattccaaagtttttcagattgatttctgaaaggtggccattgattgctcaacaaattgaagttgcagaacaaatcgaatatgataacctttatttagatatgaattcaattttacataattgttcacattcaaatgacgggagaaattagtcgtcttacagatgaacaaatctttggtgcaatatttgcctatattgatcatcttttcaatttaattaaacctaagaaagttttttatatggctattgatggtgttgcaccaagagctaaaatgaatcaacaaagagcaagacgttttagatctgcagttgaagccgaagaaatgttacaaaaagcaattgaatcaggtgacgcaattccaaaggaacctgcatttgatacaaatgcaattactccaggtactgaatttatggctaaagttacagagaatttaaagttctacattaatcaaaaagtttcaaatgataaacaatggcaagatattgaaattgttttatcaggtcatgaagtaccaggtgaaggtgaacataaaattatggaatatattagagttcaaaaagctcaagataattataatccaaatactagacattgtgtttatggtttagatgccgatttaattatcttaggtttagttgctcatgagcctcatttttcaattttaagagaagaagttacatttggtcgtaatcggaaactttcaactgatgtatcaaatcaagtatttttcttattacatatcagtatagtaagaaattatttacaagaagaatttgcatctttaagtgatgagatttcattcgaatatgattttgaaaaggttttagatgattttgtccttattttatacgttattggtaatgatttcttacctaacttaccagatttacatcttaataaaggtgcattcccactattattacacacttttaaagaagcaatgagacgtactgatggttatcttaatgaaagaggtcaaataaatttgaaaagattagcagtttggcttgatattttaagtatttttgaattagaaaattttgaagaaggtgcgatagatgttgaatggtttaataaacaattagataatgtttcaagaagaggtgaaagagctagagatagacaaggtaaagaattattattaaaacaacaaaagaaaattgttggacaattaggaaactggattttaaaagtttatcatgaaaattttgatattgagttattttataaagacgaatctaagatacccgaacttagcttaccttctgaatttttcgaaagtgaattaaatactgagtttatcaaaaagtttgcttatgaattaggattatttattgttcaccatggaagtactaatacatacacagctaaattagatattgatggtattaatcaaggtgaaacctaaagaagagtttgatgaaagatttattcaaattaagaaaatcattagaaactatcaatcaggcataattgttgaggatgaagcaactttacgttcagaggaagatttatacaacgttaaattcactgaatggaaagacaaatattataaagaaaaattacacttttcaataaaagataccgataaaattgttgaaatgaccgagaattatattgaaggtcttcaatgggttttaaattattattataaaggtatatgttcatggccatggtattatagatatcattatgcaccacgtatttctgatttatccaacggtttaaaagttaaattttcatttgagatgggtcaaccattcaaaccatttgaacaattaatgagtgttttacctgcaagatcaaaggaattaattccagtatgctatagacatttaatgacagatgaagattctccaataattgatttttaccctgatgattgtgatattgataaaaatggtaaaaatgcatcttgggaagctgttgttttattatcatttgttgatgaaaagagattgaaactcgctatggaaccactaaattcaaaattaaatattgaagaaagacaaaggaactcatttggtaatgatctgatatatacttataatcctcagatttctacattgattaaatcaccattaataagtgttttcccagatttcacatctcatgctactgaatctgaatatattttaccatcaatggaaggtaaagattttatttttggtttatctaaaaatgttttaactggtaaacacatgatttctggttttccaactttactaacaattccttataccagtgaattaagaaaggacgaattagttgttttccaacaaccaacaagatcagaatcaatgattttaacattagaaaatgaatatatgaatgttacccctgaacaatttgctaaattgtattgtaataagattgtttacgcaaattggccatatttaagagaatatcaagttgtttttgttgttgactctttgatgagatacgaaattcttaaaaatgattctaaagtttctcataccccaatggaaagttttgaaattgctgaatataataagaacattgaagacattaattatataatgcataacaagaagggtttaagatttgctgctaattcagaggagattgtgtcagatacaaaagatagcaagcctggaaaaattcctaaagaagaaatcgatggtttagtatatgttagaaaagttgttggtgtttctccaactagttctggtagattagttaaaacatattcagataaattagaatttttccctattcaattaattgtaccttctatcgagaatgcagatccaagattccaagagaaagaacctgttccaattgcagaagagtttcctagtggaacaccagttattttcttaggtaaagcagcatatggttcatctgctgttgttattggctctgaagacaacaaactagcaattcaatttaataagagtgatacacctgaacctctatttggtgcagatgctgcaaaaattgaacgtgaaagtatcaaatattattctgcttatgagacatctaagattttaggtatctcaacatttttcttatctagaattacatcaacctacatgatattagacaatcaaaagaaaatcaatgttggtttaagtttgaaatttgaaggtaaaggtataaagacattaggctataccagaaagaacggtagatcatgggaatatagtgcaattgcgatctcacttattaaagattatttatcaaatttcggtttattccttcaagctttactaagatataagggtaataacatacctgaatcaaaagaacttttcaaaaacctgtctgttgatgaaagagaggaactaattcgaaatgttaaagactatctattgaacaaaaaggagaattttgttcaagtttcattaaatagtgactctttatcaagaatttcagtttctaaaattgaatctcaaattattgagtatacaagtacccctcatccaacaacacaattgaatgttaaaggtattccaagacttgcagttcttaatccaagtattccagttttgaagttaaagcaacaacaatttagattaggtgatagagtcgtttatattttagactctggtaaagttccacttttttcaaagggtactgttattggttataagtcatctgacactgctatttctgttagtgttttgtttgatttcccagttcttactggtaatacattcgatggtagattgaaaactcaacgtggtttatcaattgattcaacattattgttgaatattacactgaaacaatttttatacttacctaagggatctactaacaaaacagttaaacaaccaaataataaggctagtgacattaaaaaacctacatctaaaaatggtaatgcaaaggcacaaactaaagttgaacaaaaatctcaaaaacctgtaaagagtaatgaattagaggaatcaaagaaggcaattttatcctcattatttgcaaataagaaagaagaaaagaaggacaaagaagaagtcaaggttgcagaagatacttccgctccaaagcaactgccagcagctgcatcatcagataagaagaatgttttaaattcattagttaataatgtgcttgcatcaactgaaaaagcaccatcagctccggttatcaataatcaaatgccaccaaatggtttcccatttgtcattccaccaatgaacggttttgttccacctccaccaggttatccaatgccaatgattccacctaatttaatgtatccatataatccaaatatgatgccaattccaggaccaccattcccaatgatgggtcaaccacctgttcaaggtgcaccacttaacgcggatgctgttgatggaaaaccaaacaaggaattatctaatgatattatggctgctttgaagggtgttgagatttctgataaaaaagaagataacaaatcacaagctgatgaaactaccaatggagttaataatggaagttcaagaagtagaggtaatggtagaggaagaggaagaggtagaggcaggggtaatggtagaggtagaggcaacggaagagttagaggaggtaagggtgaaaccaactagatctcttacacggacactcaataaacctgtagtagtaattaatgttttaatcttataaagcccttttttcttattataatatatatagtacacatgtatgaataactaattgttttttaaagtgaaatgtaagttatttatgaacatttaaccatttctcttcaaatccattcccacgaataataccatcccaatgataacctggagttatattgaatctgttaggcggatatcttgaaacatcagtaaataatttaccaccatcaggacttacaaagcgtgaatctattttctctttatgtttagagataactttcttatcaaataacaaagctggatcttcaaaatcaatattatcttttcttaattcatcttccgttttctttattttgttcttctccttttgagacagtagcttttcacgcatttcagtttctcgttgtaaacttgatttattggtagaaccagaatgtctttttttctactttttggagttttgttgaatgacgggattccagatgttcagattctgaaagtttacgtctttttggttgtttctctgttacaataggatcagaatctttcaattcttttgttggttccgataccgactttttatcatcttgccgtattacttcactctttgtctcaacatttatccatttaccttcaggttcagagctatcaatgtgtttcttcacatcattattgttttcttttttactttctttatgggtatcagttttcccgaactacgtcattttttttaattttctctatcacgctggcattttctggatccactattttctccttcttcttcatatactttttatccatatactcctgtaatgacaacgaccccattgtgcttgtagagtatcaattggacatatatcttcctaaaaaagtaagattaagataaatattttactgtaatgatgtagaagtgaaaaagttgtaaaaacatgttaaaattccgcgcaaaatctatacgtattatcccacattcttgagtttcgccttttcatttaattgatttggttgatgatatatagtaaatattcctagtagttgtttctattatcagtggatactactattggcaatgagttttgaagattggagaagaatagatgttgatcaatatgatccagagaatgtatatgttgaagatgaattaccagatacacgtccaaatacctcattgcaagatattcaatcattaacacaaacattacgtagttcaattcagcgtatggatatagttaatgcattgaagactgcaattgaaaacgcaccatatggagcaagtgaagaagttaaagatgcttttttacattcagtttatgaaagttttcgtaagtgttaaattaagtgatattaataatttcattggacaatttgatatagattcaattgatgcaattgttaaatttgtatatgttttaatgagtaaagaatgggcattaaagcaatcaagcacattaattgtttggttagatagaattgttgaaacagttggagatggtccaattgtacgatacttaagtgatccatataaattatagactattataaatttataatgaaactttctattagaaaaaaaacactttgatgatatacacactgtctatatatagcgttagatttgtatatattatactgtattgttattaattatattatatccattacttacctacctacctacctataccctcctatgatctcttaatgatcaagtacaaattacgtaataatccatacttaacatcgcgatttccaggcttttgacatgttgagtttaccagtatgaaagagctcttcctcagtagaggcagaaactggtattcattgattcaggatcaatttaactaataagtacacgaactatggctaagaaatcaaagggtggaaagaaagcaaaagctaagaataaccaacaaaaggaaaaagtagaatatgaaattgtaccagaggataatgatgctacttttgtagttggtgattccggagacgaggatgaaattataagtcaaaaagataataatttaaatggaaatgatatagaaaatgactaattctattgaagatgaaaatattgagaagtcaagttgatgaattatcaagcgataaagaggaagaacaggaagatagcaatgttaatgaaactccagtttctcttgatgaacacgaaattaacatcccttgaaagtactcaaaatttatctcctgaaatttcaggaattgctgacgaattgacagagaaaaaaaatgaagaagaagacaatgaagataatgagggtactcatataacgacattgaaagatgacaaccaaggactattgacaaagaacgaaacttcccaggaaaatagtgaagatgataaaactgaggaagttttaaaggtaagttcagatcatgagagtaccaaagatgaaatagaagaagaagaaaacctgaaccagaatgtagagccagtagtggaagtaactgatccagtaattgaaaactgatactgaaactcatgttgaagaatacacaaaaaataacaatgaatcaattgaagatacaaaagaaattctttcagaaaaatcaactgaagatcataatcaaaaggaaaagtttctctaattgaatcagctgaaaaggataatgaaattcttacagaagatccagtcaaggaagaagttgaagaaccagaaactaccagaaatgaagaaaacgaaattaaagaattggaatctacagaagaaacagaactcgaagtcaatgaagaaccaagttcaatgtccagaacatcttccgaaaaggctgattctattatctctttcaaacacgatgaaaatacaattataagctataatgaaacagaagatcaaatcaatgaaaaaatatcattgaatgatcctactccattaactaatgaagaacttagaaaattttacaaagtaaatttatttatggactggcagtggtaaattttgatcacattaaagggaccagaattaacatattggttagatgatgatataattaaagtaaatgaagatgatgaacaaaaagaaaataaagtaattgatgaaaaaattgataaatatagtaaaatatggccatatctggcatttcaagcattacccgatggagttcatatgtttgatgaaacatttacacaatttaccttgagttatgatgaaaaatatcaaagagagacaaatgatgaaggagagatgacaacattatttcggatgtgcatgtataagacaaattgattcaagtttaattaaacccgatgaagatgttaaaagaagtgttgttcaaaaatctattatattaataacgagatgtccaattccaattcaattacgtgaaaagctgagtataatttgtaaaagttggtttgaacaatatgattttgatgatgttagtatattaaaattattttatcaagatatttcaaggaattataatgaaaatggatttataattcaagatgatgaattatttggacaaactaatgttgaatcaagtaagaaaataatcaaggagggagaaattttaatgggatttaattttcaagatattgttattaaattacgtagaaatttattagtattatttaaattacttattatgggtaataaaagaatactgatattttcaaaagacttaaacttattatcaaatacacagtatgtactgattggacttatagctaatttaattgttcaattagagagaagtggatatccgaagagtaaagaaaatgaaagggttcaaaagtcaatcattaaaaagctctgatagatcatcagttttaagatttttaggattaccattaaatattttcggtaatggaagtttttttcaaccttatttaacgttacaacaactgacatatttagataaggaaggagttgaaagtttccttgttggatcaagtaatgacattattttagaacgtaagaatgaatggtttgatgcagttttatatttagatgaaaaggataatagtttattaaatagtattggatttttgaatttaggttgtaaactagaaattgttaataaatcattgaaagataaattaacattaagttgggatgataaaaaatttattgattatataattgatagtgttgaaaagcataaacttgagaataaggatcatgttgaaataccggagagtaaaacaataaattctaattcatcaattgataatggtaattataaaggtggagatgattttattagaagtttatttgaagattatctaattggatttctaagctcaattaaatacgatgaatttttgaaaaatgaacatgagagaggatttgatcaaattaatgaaaatttgaaacttgacttatttgaaaattgtattggtaaattaatattaaatacgttgaaacttttaaagagagtaaagtattcaaagaatggaattctattactgaggatgaattatttaatttttttgaaccacgtcatatacatggagatgaaaaattgaagaaagaggaagtggaagatcctatcacttctaaacaacttggaagaggataaaccagaagaagaagctaagaaggaaagtcctaaagaagatacagttgaaattgaattaccgaaagaaggagacaatgaagaaccaccagtgaaggaaaggaaagatgagaaaaattctcaatgatatcaaatggtttcttcaagaagggtgaagatggaggtgcagagaagatacgtagtttgttctcatggaaatagtgtaatatctttataaatagtaagaagtagctgtacataattctaaccataataatgaaaatgataatattacgataagataagataagataagctataaaacatgcgccacaaaacgtggtacataatcaaattacttaaaataatagtagtgcaccagcctcaatatcgaaaaagaggctaagtttcccgtccatgtccttgattaatggattataaagcaataaatctggtgacgaaggattcctttacaattgaaagtaagatatttcttttcttttatttatttactatataatcacggtttttgctaaatggtaagccccattccgccacaaccacttttcacagtattaaatgaagcaaggaatggtatttcattcacagagattacatttttaacatttcaagcagttattcaagttttcttaatttgtttatcaggattttgggcatcaaatgttggattattaaataatgaaggtattaagacaatttcaagattaaatgttgacttatttacacctgcgttaattttttcaaaattagcaagttcattaagtttaaaaaaattatttgaattaattttaattccaattttatatgcaattacaacattcgtttcatatatttcatcaattttaatttcaaaatggtttgatttaactgaacctgaatcaaattttgtaattgcaatgtcatgtttttggtaattcaaattctttaccagtttcattaactttagctttagcttattcattacctgatttagaatgggatgatgtagttgatgatacacctgataaaattgcttcaagaggtttaatttatttattaatttttcaacaattaggtcaaatgttacgttggtcttggggttataataaattattatcaaaacaacctaatcacgttattttctataatgattatacaattgatgatattaatgaatttgattcattaaatgatattgaggaatttgataataatacaactagtacaaataataatagtaatagtaccattaataaaattaatcgtacaggtttcaatgataatgataatacttatatttacgataatgatgatgatgcatcaccaaatagtagattattagataataacaatgataatattaatattaataacattgaacaatttgatcataatactaataatattactgaatcagaggaagataaagatattgaaatttcaatttttaaaaaaataatcaattgtattttaagttttatgaatccaccattatggtcaatattatttgcagttattgttgcatcaattccacaattaaaggcagaattttatgaaaatgatggatttattcaacatacaatttcaagtgcaattaaacaattaggattagtttcaattccattaattttagttgttttaggtgcaaatttagcaccaaatagtgatataccagcctgcaagtccacattataaaaaaatgattttaggttcattattaggtagaatggttttcccatcaattattttattaccattaattgttttatgtgttaaatatattaaattaagtataatggatgatccaatatttttaattacatcatttttattaattacttcaccacctgcaattcaattgaagtcaaatttgtcaattaaatgaactttatcaaaaggaaatggcaggagttttattttatggttatgcaattttaacattacccgttacaattattgttgttgttacatgtattgaagcaatgaaatggactcaagcttaattatatgaagtgatctatctacctatataaataaagtaaataaattttataaaaagataaaaaaaaattccaagataataacggtaaattgataattgataataatataatctagataaggtacattacgtgatgatgttatcaatttaattgttgcacatgatgtggctgggcaaaaattatttttcttacttgatgattgtcaaatttcgaggaaattaattagttttctgctttaaggagtatcctttatcttgggaggcaaattgtattgttctttttactttcttatatcgtctctaagcaattgacaatataaaatatataagcaataatgtctacatttttatttaaatggtatgtactcaattgattaagagaaagaggagaatacataatatataattgatttattttatctaatttcccgaacaatagaatataattagaatactaacatttacctaatgaatatttatatctatatttatacaggcctgcagatgaaaaagttgaagaagttatagttacaggtacatttgatgattggtcaaaaagtttaccattaattaagagacctgatggtagttttgaacttgaagttccattaccaaagggagagaataagattgaatttaaatttgttattaatgattctgaatgggttacaagtgatcaatattggacaattgttgatgaaactggtaatctgaataatttaattcgaaattagttcagatggtgaaattattaaaggtgaaaagggtaaagtttattcaaatggtaaaaatgaagttggtaaaacaattattccagaaagtggtttaagtatgggtagcaatgcagttgaaactgaaaataaagatcttggtacaactgttatgccaagtgaagaaggtgttcaaaaaacattaggtgaaccaggtatttatgttccagaaaatccacaagagatgaatgttttcaaagaaattagaaatgttgatgcaaaggaactgaatgcacaaattaagaaagaagaagaagaaaaggagaaagaagttgaaaaaagtgcagcaactgaaacaactgcatctgaagctgaaaaacctaaatatgtaaagaaggtcaagaaacttgttccaaaggaaaatcaaggggttgatgaaaataaggctgaaaattcaactcaaactccagttagtactccaagcaagactacaagtaagacacaagcagcaccagcaagtgcaagtagtagtaaaaaggaaaaagaaaagaaaggatttttcagcagggttaaaaaagcactttcttgaagatatattatatttcaatcaatatatccgtggtttaagtacttatcgtgtttaatactcaaataatccgataatttttttgtttcatgtctcttattttaagtttttttttccgtcttcctttcaattgagttcaatttcatgaactagtttctgtatgtgtgagtgtattgtgtgttctatattattaaattttataactatataattgttactctcgttttaataattaataattaataattaatatgaagatatagacgtcatttgggaggacttaaagatattatatcaggattggaggcgcaactccaatagctcgcgtctatattaatgacgaaaacattttcaaatggggttatatcggagttttactgtagacattaatagcatcttagcttttgaaagaagaaagataatccagactttttctttattatattatattataccttatttccgcaccgagtaccctgtatacatttccttgacatgatatgttaaataaagtttgtttgataacgcaataatagacaatagagcaagaaatttacgataagtgtaccaaagactgttcgatttgatacataattaataataataattaattattaattaagaatataacgggacctgcttaacaatattgtattaaagtcataaagataaggtttttttcaacaaatactttgaaaattaaacgatcaattggatgtgattagggaagatctttttggaaatttttttcttgtagatttaaagaaagattagttatattaggggaaaatgttttaagtaataattgtactgatttttattattagtagtattacaagagtgattaaaggcttattattatttgatttgcagtatatcaacgatttatcaatggtatatactagatcgatattgtatagtatagtattttaagtaataattttatttattaagatctattatcagcatataataagcatttccttaaaggggaaacgaaacaaagaatgtttaatatgatgataattacgtaattatgttatgtaataatattaatgataacaataagggaaggaaaataaacaattacaccggttttaattgctagtgctatactaataatttatcagtgatctggggcattcatgcatcatttctgacgtcaagtgagggtgaaatttttaaaatttacgaaaataatataaatactaacaatggtacattttacattcactggagattgtcttagtggcaagtcttagcgctgtcttggctattaactataaacataaaattattttaatttcttcactggaaaagcttcgatagggtttatgatttataaaatattcaatttaaataaatattttattcccccccccccattaataatgctcagtttcctgtattttagttaattggtgattggaaatatatattatcttcaaattatgttagttgttttccatttccatttttattttgattcctattttatattactttattcttaatattcattcactaaataatggattctcaaaacagatgtgctataacatctctattaaatgatgcgccttcatctacaaatacttctttaaaatcttcaacaaattcttccgaaatctcggctatttccgaatcttcaatattatcaccactatcagataattcaattaatgatatagatattaagaaagaacatcttgaacatatcgaacatattgaaaatatcgaacatattgaaaatattgaagatattgaaaatattaaaaattttatcaaaaaggaagcaaaaattggtggtaagaataaaattgataaaaatactaaacctgaaaaaattgattgtaaatggatcaattgtacaagatcatttactgatccacaaaaactttatgatcatttatgtgattttcatgttggtaggaaatcaaataaaaatttatcattatcatgtaaatgggataattgtaaaactattacttcaaaacgtgatcatataacaagtcatttaagagttcatataccattaaaaccatattcttgtaatgattgtgaaaaaaaatttaaaaggccacaagatttgaaaaaacataaaaaaactcatattaatagtgaaattaagaaacgtcaaaaattattttatgaaaaattatctttattaactccaatacaaaaatctgaatttataaagagtaattttaatttctttgaaaatttagatgataataataataataataataatagtaaatataatcataattatcaacacataataaagaaagaaaatacactaatttataataataataataataatattaatcataataatagcaatgctattaatataaataacttcaataataattcacaaattaattataatgcaccaccacaatatatgaattttcaacaaaatcaatcatatactcatttaatgtacgttcctgaaaaacaacattatcaaatgatatacccataccaacaatttcctcaacaacaaattattcattttcaaccaatgatgatttcaaattcaaattccagcacaaattcaaattctagttcacacacttcaatttcaaatctaaattcaataagtataccacaaccacaacaacaactacctcatcaacaatataatttacaactaccaccaactcaatcatctcatattcaaccccctcaacatcaatatcaacaatatacaccaattccagccccagcccctgctactcaacaaagttacattcataatgcttatccaactcataatgctaataagttttaccaatcaatatgaaaccgaaaccgaaacttttatataacttaaaatagtgccaagactgatttttcttctatattaccgaaaaatttaagtatttaccgacgggatgtttctcgtcccccccttatgaaaaaaaaatttgaattttttacgtggcaacaagtcatcgaaatcctcaaatattatacgaacaataacaagttcagtatatctgggttggctcagattaaatttacgtatataattgcttaaaatacattgaaatacaccgtatgattctttttatagttaaatattctaaagcttaatgaaaaaacttaataaatctgtaataatttgcgaagtgtacatgtaatgcataaactatatcaactgcgccacatcaatattattataatattattttctgcgccacacaatataattacgtaagaatgttcattaataacatgattttagtctgaaattcatttaatgattttgaaataacgactatcatgaatattctcttttaataaatgccacaagatcaatcaatatcgactacacacacaataacacaatcttcattaagattgcacctttctgcaactccagatatagaaataaatgaaaataataataattctaatgaaaaatcaaaagattcaaaaaaagttacttgggaggaagatgttatagataatgaaaatttaggtcgtaaaaagactaaaatttgttgtattttccatccacaagatgaagatcaatacgaattaccacctgattcagattcggattcatcttcgtcttcatcatcttcatcagattctgataatgatggtgatgaggggaataatgagggtaaaccaaacgcttatgagagacaacctaaatataagaaaaaatcaaataaacataaccataaccataaccatagtcatagtcatagtcatgatcatagtcatgagaatcacagtcacacccactctaatgtataatatacgatcgatacataatcttataaataagtctatttttaataaataaaatgttttacttttctaaacaatctatacaaatttaaacattgatttcaagatttatcaataatccatatatttctcttggcatcttatatttaataagaccagcaaatatcacacaatttttagaaacttgctttaattcttcaattttaacattattaatattatcaccattattattaatattattattatcttggatattattattataatatgttaagtattcaatcaatcttctaatacatgtcatttcaattattaataaacttggtatatttttcattatactttcattataattattaaattcagaaatatatcttctaattatggatatatcattactatctgaaacaattggaattatttctaattctttaactttttccattattgaaatacatctattacttaaattattattctcaactccaattaaaaattctttgattatttcaaaaatatctaataatttttgacaattaattctgttcttaattgatgttttggataatatatcagttgatgaattataaatttttaataaattatcacttaatttaattatattactttcaccttcattttcaatattgtttaaaatttcggaaattgagtatctattattaattaaatcaattgagttaataaaatctcctaataatttctcaacaattgttaaaactgtatcatattcttcacttaattgatataataatatacaatcaattaatctaccttcttcattagccctttcagcggccttttctgctatgttatataaatatgattttgtatcatcaaggaaaattagtgatttcctatcttcaataataccaggaattcttgtaccagttttagtcaattttcctaaaagtaaaacaaattctctactttccaaaactaattctctgattgattccctacaaagttcaatttgtgattcctttaattgtttattcttttcccctccatcacttaaacaaattaaaaataaatattcacatgcaactcttggatcactaaatttaaaatttttaacataattaccaatcattctactaaaattaattgacttaaatccttcttcaccaatattcattaaattgtttgatttaacattagaatcagtttcatcacttactctaattaatccataataatttaaaataattgctaaatgaattgaatcaatttcattaattgtcattgaatatttgattgcatcttcaaataatccaactaataataatgtttgtaaatacattggatttttacttgatacattaaatgcatcagatccaaattcaagcacatttttctgtaaatcaactaatctatatctttcaattaatgaatttgatgattcatcaatattagattcattaacagtaacattgatatcatcaccttcttcctcttttattaatgataaatgtaaccataaccaatcttcaatacttaatactattgaaggcaatgtttttctagctaaatcacatctaccaataattttataaactgcatatctgaaaggatcaatatctttacttgaatttttcatatattgattaaattcattgtttaaacgtccttgtaactcatcacttaattttttattatctgattcacaatatgatttcaaataaaatgggaaagacttctctaatttttggaatgaatcttcatattttgaaactaatattattgcttcattgtaacatcctgctcttaataaataaaataaaattgcccataatggtacaccattaacaattgtcatatttggaattttccaagttttttgcttagtttttaatgttttatcaatataattcataactttatcaatatttggaattagcagtttattttgatctaaaattgacgttgttgttgttgttgttgttgttgttgatttattcaaattattattgaataattcatcaatatagtctctaaattgagtttctaaatattctttacttttcaaaacaatctgttctcttaaattgattgattcaaagtcagttaatttagaatatgttgcattggtaaatctaccaggtcttaatttatcatcaatattgtcatttaaattttcacaaaatgatcttaatattataaaactttcttgaatttgactatttttattattattcatatttgatttgtaaaatgatgaaagagaagttgcaattttataccattgtttgtcctttcttgcttcattaaaatcataaataatttctgcattaccttcaaatttctttctcaaaccatatgaaacatttgggttcataatggaatctaattgattattactttggacatcattaaatttaaaactattagagataagacttttcgtcttatgtgcaccccaaatcaattgtttttcaattaattctttattggtgaattttttagtctttttctcaggtgattgaagagtaagactattattagatggctctctttttaaaacatttgataattgatcacatagttctttctttttctcattccaatctaaattaatattattattcacaaatttatcgaaatcttttgcagttgcagataatgaattttcaattgttgataatatattttcatccttttgtttatacatatagtatcccaaattggtattcttaatattagaataagtattatttctattattggataccaatgatgaattatttgaaagtttatttttataatcgatattatttgatttagttattttttcaagtttttctaaatcgtcttcaacttcttcaactgtaaatcctttaccaattaaaagataatgtgcctttgtatacatattaacatcattatcagttttattatattttcttaaattatgagcccgttgttgtaattcttttaaacttaaatgtaaaatatcgatatcatctaaacgtctaggcaaatttttagaagattggaccaaatcattcaaaagtgatgccctacctgccttatcagcaattccatctttctttattgctgttagagctgcttgagacattgaaactacacgctatttggatgttttcaacaagaaagtgacacactccaaagggaaaccattgaaatttcatgtatgtttacgttttacaatatgaaatacaaaaaaaccaaaaaaaataaaaaattcctttaaaagggcgggtaacctatacattctatttattctatttacattctatttacatttacaagattaatacactctttatcttctatcttcttctataatattagcaaataattgatttataattgaagttttctccagtattgatttggatatttctcttgagtcagattatgtgctttttccttagaaattttcatatctgcaacaggacaaacactttcaaatgctttttcagatggaatatccatatcaactttaataagttcactgaaatgtagtttatcttcatcatatatactctttaaaactgtagcacccctcttagaaatattatcctttcttaatctattaccagtttcatcaactgtatcatgtgttttatatgcatatttgaaaatactttcacgaattataactcttgtaccttctggaacataaatttgaaatagtccttcaacattatcaactgaacttgtaggttgaattgataaaaatcccaaatcttgaataacaatatcaatattaccataaaatggtggtataacatatcttactaatttatcaaatgcttctggtttaacaccatatcttttaccaatttgtacaggtctagttttattgatctctgcagctcttttaaaatctgcatatcttgcttcaaagttactttctgatctattaaatgaaaggcatgtcttcataacaacattctttggtggaactaaatagaaaaatcctccgtatgaatacatacttttaccactgaatatttttggtcccttaacctttattttagtatatctgttacgctgttctggcgtaaattgtgagtatctaagtttttttctaataactccaccaagcatatgtgaataaataccaccattttgtgggaaaaatccaggagtatcaaataaattatatttacccttgtattgaaatttttgaacttctttggtgaaacctggaatatagtatgtaccaggtgatgcaataccgacattctctaaataactcttctttttattttcaatttttttaacaaccttatcatctaatttaattttatattcagaagcaataattgatttaattaatgtacttttacctgaatttgctctaccaacaaaataaacatcacctgctggaattttattgataaatgggttaatatcccatgcctttacagatgagacaagaaaaacctttgctggatctgcattcatatattcctttaaaacatctcttacatattccaaaccagttctttcaatttgaacttcctttctataaaataaatcagctttagtgactgcatagtatatactttttggatctctatttttcataatttcactattacaagataatggaaaatcaaaaagtgaaacaacatgaacaactgtagcattatctggtatattattcataacactatcaacatcacatccatgaatatcataaataccatgttgttttaaattttggcaacgtttacattcaattaaatgtgtgtatttttcaatgatttcacgtttcttttgttcgactttaacttggaactcagaagtgacaggtccatcttctatactgattcccatctctttcaatatactttcatctaaattgttaacatcaaccgtattgttctttttagggaattttaatgaaactttgggtaattcaaaatacttatcatcagaagaattattactttgtaaagatgttgtaccacatgttttacatttgattgatccactattttcaagttgctccattattttcttatattcatttgttgctaattgaagatcattcgtatcctttaatgtctccggacgaataattataccatttttagcagttttacggaaaaattcccaatttggttttatattgacattttttgaatcaatttttaatatcaaagagttaccgaattgtcttctgaacacccctccaactctatatcgtagtatacatggtctcattgataatcgatgccttttgtcaccatgaaaagtcttaagttaatgattgtaaaaaagttccaaggtgaaaaaatttgttagtagatattcccacttacgtaatatcttgccaacatgacttaatgaacaattttataaactcttttggcgttattaatacaaatagtttcgaaataagctcgtataattaatatgaaatacaaatgatatataaaattgcaataacagagtaagttttataaaaaaaattggaataatgtgatataaaaaaatgatagataaaattcaattcaatcaggtatcaacttgttcgatgattgaagaataagttatctcaaaatgacaaaataaaaatgaagataaaaatgactttttttctttttggtaaatatgaatattaatttgaaaaaaattaaatattagttagtgtaatataaggaagaaataataataataagaacaattaagcatcaaaagtgattttaatttgctggtttcttaggaactaaaactttatcatcacccttttgtggtgcaaaaatagtggtatccttttcatgtctatcaattcttgccttttcgaaccattttttaacattgaataaaccactaattgaaaaaccttgaactctgaaaagatagtaaccagcacacattgcaaagaagttaaagatgatataaatccatgcaataccaaaatttctccaatgttgattgtaatgaataccatattgttcaacaacttgtgattgcatagtatatggacaatatttacattgtgaattttcagttggatttgcaacataaccaccattattatcaatataagttgataaataatcaccacaagtttgaccacttggtggatccatgatattatattctctaaatgcacaaactaaaactctatcttctaaaattggaccaacaaaggcttgaacgaaataagtaaatggtgatgcaacatacatgaatgaccagaattttggtgaccatttctttggatttaagataccacagaataacaacatagatgcgaataaattagaattaatcatagaagctgatggaacatctggtgagaaatataagacagctaaaccgtatgagatgaaatagattgggaaaattaaaacataaatgaagaagaagaaacctgcatgtggagcattacctgaatattgtgctggccaatagtaacagatgtaacagaagaattcacaaataacagaccagaaaatttcaattaatgtatgggataacaataaacatgaccagtggaaagtatttgataaagtttctctgacttcaaacaattctcttgaatcaattgcaaagacatgggattgattaatcatagccaatgaaattaataataacatgaaaacagatgagaaagcaccttgggcaccagcaattgtatgatcaaaaccgacataagataaaccaacgaataaagcacatgagacacattccaggaatttagctctaatataaacaggtgatctccagaattgtaaataggttctctttaagacaaaccagaattgttgatcataagtagttgcatatttagaagttaaatcaccaactttatcattaattggtctctttggtaattcaatatgaagtgtatcaatttcttcagtaactttagcacattctggtgaattattccataattcagaccaatcttgagcagcagatgcagttgcaccagcaccaatacaatttaaaatatattcagcaggattttcagaaacaccacatttaacaccagaataacgttcaaaataatctaacataatagaagaattttcaccaatatcaccaaaataaacagttttaccacctttctttaataataataatctatcaaaaacttcaaataatgttgctgatggttgatgaatagtacataaaatagcttgaccagaatctgcaagagctttcatgaattgaacaattgaccaagatgattcagaatctaaaccagaagttggttcatctaagaacaataataatgatggctttgcaactaattcagttgcaatagataatttctttctttgttcaacatttaaacctctaccaattttaccaaccattgcttcagcatatttatccatacctaaacaattaataattttttcgacataatcatatttttcactttgcggagttgtctttggttgtcttaaatctgctgcaaatctcaatgattctctaacagagaattcagccatatgtaaatcttgttgttgaacataaccagttcttctcttaaatgaggaatctaaaggtctaccattaactaacatatcaccagtgattgtaccaaaagaaattctttgagctaagacatttaataaagttgttttaccagcaccagattcacccattaatgcagtcatagtacctggtttaacataaccttgaattgaacataataattgtctggttgcaccttcataaggaataatataatctaagtttttccaagagaaaacatctgcttcactgataatcttatctaaatcagcatctggaccatttaatgcaagcatcatttcttctctagtagcaactttaccatcccattcttcaccaccagcggcatctggcatatgacctctcttgaataaaagcatatcaccaccactttcaacatttttaataaattcagccataaaagtattaacagcaatgaaacctgcagtccaacaaatattaataccccagtatttccaaacattatgccatctaaagtcaaattgtcttgaaatatatgaatcaccagaaacccaatcttgaccttgaactgaaccagccaaactacaaatttgatttgctaatgaaacattttcataacctggacctgaaggaactaattgtgaacattgcataactttaccatggaattcactacccattaatgaataataacaataaaacattggatttaaataatgaatccatttaatccaatgatgcatacttggtaatggtaacataaaacctgcataaacacaaagcattaaaacccataaaccaccaacggcatgtgcagtagtaccatctttagttaaggttgcaactaatttgaaaatgaaagacatacattgttgaattgttaaaaggaaaaggaagaacataaagaaggcacctgcttcatgttttaaatttggcatccaataagcagttaatgacaaaataataactgcaattgcctttgttggcagttcagtaatcatttcttgtaaagcttcagcagataaatggtacatggaataagatctttgtttaaccaaaatttttctgtttgtgaaagaatttgcaatttcagctaaagaagttaaagcacagaataataaacaatagaataaaataccaccacgagaatatgcaccaacagtttcctttggaatatggtaatacattgaaccgacaacaaaacctttagtaacgaaagaagataaataaaccatagtataagtaatatcaccctttgttctttggaaacctctaataactaaatatttcaattgagcaaaataattgacaacaaagatagatttatttctttgaccagcttgctttctttgattagttgctaattctaatcttgctcttgtttcttcagcattatgattaacaataaaatcatcatattgagcacataagtcttgatattcaggggaagctaaccaatattgttcaaattcatcaggagtttcagggattttaccttcaaaaccaggtttaatttgtcttgaagcaggagatgtaacagcagttaagaattctggagcagtcattcttgaaggttttaaataacccattttttcaaaataatcaataccatttttagcaggaccccaataaatttgtctacccttgtagataactgtaactttatcaaataattcataaatgttttgacctgcttgataaatagcaaccaatgcaccacatcttaacatgttagttgcagttcttaaacattgagtaaattctaaagcagttgaagcatctaaacctctggttgcattatcgaaacaatagaaggaagcattcattgataaagcttcaacaatggaaactctctttctttcaccaccagagacacctctaacgaaatcattaccaactctagttgaataagtatgagttaaaccgaaaacggtacaccataattttaacatattatcaacatattcttctcttgccatattatcaactcttgtctttggagttttagttcttaaagcaaattgaatagtttccttaacggtaatataagggaaatggaaatctaattcaggattgtaaataatgtaacctgtaataatagtaaaaaaagagaagggggaggatattgttagtataatgtttttggaaaataatagtaataagaattagttgaatacatacctttatattttttcatcatttcatcttgatttaaaccatcataagaaaaatcaccttcaactttagtaaaattttcaatttcaccagcacaagcttttaataatgaagaacaacctgcacctggtttacctaaagctaaaactaattcaccaggttgaattatacccataaaatttctaataatttgtctttgtaaacgagaatcttttttgaaaaactttaaaggccatttataagtatctctaagcatttcaggaactgaaggaccataagcagcagatgcatcaataccccaacaagttaaatctttgaaagctaaaccagaatgtgctgattcaataccttgatctgaagctctttcatgtaaatattttaaaagtaattttaaatcaaaatcttgaggattaatttcaaaatgatctaaatcagcctttgtctttgttgataaaattctagctaaagattgaactttttcaataccttcaggggttgataaaattcttgataaatgttgagataaattttctgcatttgattgattttcaatatcatcaattggattaaattgtttaacttcaccaggagatgaagaatcaatactttcagtatcatttaaactactatgattgtcactcattttagttattattgatattgatgatacttttgaatgatatcagagatttaaaaaaaaaagtacagagtaaaagagtttagaaagcacagagcaaaataagaataaggaaaagggaggtattaatagtattacaagagatgtaggaggataccataaggtatttatacgaaacagaattaaatcaagataacattaatcataaaactccatcgtatatagactgtcttcccaatgaaaagcaagaattacaggtgaaaaaaacaagcatcaaagacacaaacacgcccaagagcacccttcccgaggtatatccctcaatcgatgagtgataaaattgaaaataataggagaaaaatatggaaaatgagaaaataataaaatcactatctcaaatacttcctcattaggcaatatctccgttataataggaatccgcgagatttatttaaaccccctattatgtattatattcatattattaggtaatccattacctaagcatcaataccgctaactccacaacaacaaaaattttcgtattccgagtgaaattattttctttttcttttctttctgtgagagggcttataatattgattgactttctttgttttaattatctcacagtcccatcgacctttgtatttttttttattttttttatttttttatttttttatttttttatttttttatttttttattttttctttatagtcccatcgaccccacacgatgcttaatactttggtggctcaacttttaactatagtaatacttaaatatcaatacttgaataattgtttaagggtattatcatttgaataatcctattcataatataattgaattcatttaaaactaatgtatttaatagaaaactatacacaatatacagtataatatactaaactatattcattataatttaaaagtggaatataccctgtctttatacacttttattatataactaagtaatatgtaatacacagatacctcaactccgctagcctccgaatatgatgttaatcatagccttcattcatgcttttataaccccatataaacatcacataaccatcatcatcataatatcatcatatcatcatatggttatatagccatatcattagtaagtaacctcatttagccttttttcttcagccatattatttatcctttcttgttttccgacttttatttttgttactattactcttattattattattattattattattattactgttgattaaaatagtctttaaaacttgtttattttcctttaaattattctcaacttttcttgcatcatcaattttacgtaaataaccaccgaaaacaacaacttctgcaattaatgttaaaattgaaacaaataatgataataaaattcttaatccataattatttgaaattttataagtattaccactccaataccaaattgcatatccaactgaaacaactgtaagggaaatattgaaaattgtcgttaattcatgtttaatagtctttatttcattaatcggattgcgtgatttatcattatttaaaaatttatattctcctattttaccattctgtcatagtatctccaatatcatcttccttaacacctcctctatcatctctattacgtagtagtgatctgtaatttttctcatccttttccttttgtaatctctccatcaattttaaatatccttcacttttcttaactgtaactaccggattataaattggtattaattcactcatgtatgtcataatgttaatatccttattatcatctttcttagtaatttcaactaactcttcaaatgttataccaccttcattctgtattttatctcgtattgacacatcagctttttccaataacttctccactttactaccaattttatactttaaaaccattattagcctatatgtatatcacattcaaagaaaaaagtggttgtaaaatcaaatctccaaaactaaacacggaaataatttttcatactacgtgaattttttggcgtttccgtactaaatttgtgtactgtaaaagtagactttttggttttacttccattgattatgaccaatccttataatcatccatatcacccatacgatgttcagatatctttaatgaatgcagtttataaaactttaaaaaatggttcaaaattaggtattttcgaatctccaactggtacaggtaaaacattaagtttaatatgtgcttcaatgacttggttacgtgaaaatcaacatattaaaagcaatacaatagtagaggaagatggaaatgaatctgatgatgaaccggaatgggtaaaacaggcttatttagagaaaatcaaacgtgaaactactggtaaaattattgattatgaaaattatttagatggtgtagaacatgatggtggggtaatcgtcattgaacagggtaaacgtggtaaagttcaaatacataaacgaaggaagaataatggtaataaggagaatgagaaattggatgaatcagatatattacccgttgattatgataatgatgaaggaagaaatggtattaatgatgatgtaagtaaattacttgatgaaatggataagaaagatattgaaattgtcgataaaaagataaataatgaattgaaaatttattttgtttcaagaactcacttcacaattacatcaatttagtaatcaattgaaattaacaaatttcccatcatccattaaggaattgaaaaatgaaagaattaaatatttaccattaggttcacgaaaacaattatgtattaatgataaagttaaatcattaaatgatacattattaattaataaacaatgtattgatttacaaaaggagaaagaggttgaaaaaaaatgtcaatttatgattaataaacaacacgatgaggatctgttacgtttaaataaattcgaagatttaattatgaccaagatttatgatatcgaagatattgtagaattaggagaaaatttaaaatgttgtccatattatggggttagaggtgatagttttaccatctgaaattatttcaatgccatatcaaacattacttaataaagaaacacgtgaaatgttgggaattgatttaaccaactctgttgtcattattgatgaagctcataatttaaatgatagtataatatcgatgtattcaagttcattatctaaaaaatcattagaaagattaagaaactcattaaaaagatatattaaaaaatttatgctaaaaatgtcaagtagtaatagaattcaaattactaagttatataaattagttaatatattgtacaagtttattgaaagatgcatatcattgaatagtgttcaaaatgggaaatttatagaaaggaatgaaatattttgatgaaacaacagacttactaaatgttaactgaattagatgaatatttagttaaatcaagattagcttataaattagaaacgtacatggaaagaagtgatgaaacatataagagtaaagaaccattgttatatgaagttaaacaattcctatactcattgagtaatccacaaaaaaatggtagattcttctgggatactagtaataataatggtgatgttatattaaaatatcttttattagatagcagtgaaatatttcaagatattgttgaagaaagtagatgtgttttattggccggtggtacgatgtcaccaattgatggtgtcattaaatcacttgcacctaatttgccaaatgaaaagatagacacattcagttgtggacatgtcattccaaaggaaaatttgaaaactattgtcaaaagtgaatatgaaggtgttaagttaagatttactcatgaatatagatacaatgaggaaatggttaataaattaggtaagttgataattgatacaatgatgagagtacctaaaggttttgttttgttctttacaagttactcatatttggataaagttattaaaatttgggaaagaactggagtattgtcaaagatgaaaaacattaaggaagttttcatcgataatggtagtgaaaatattttcaatgaatatagttccagtattgaactttcagataatgctaaaggtgcaattttattttcagttttaggcggtagattatctgaaggtattaatttcagtgatgatttagccagaatggttgctattatcggtgtaccatttgcagatccaagatcagctgaaagcatagccaaaaatcagtttggtagaaattccccaatggaagacgctttacgaagagtcaatcaagcagttggacgtgctattagaaacatatcagactatgcagcagttatgttcattgatgagagatatgctcccaacagagaaggtggatagcaatggagcatttcgttatgtaagcggatggattagggacggattagctaatagagagaatattgaagaattttttagaagacacagtgttaactctatttaaggctttccaacgtttaagtatttaccttttgtatttaaaactttatattattctttatattattcttaaaatatacacaacgttcatagaaaatatatatttaaataaataatggactttgcagcagatccttcattaaacgatattataacccacgatactttacgttggattttcgttggtggtaaaggtggtgttggtaaaactacatcatcatcatcagttgcagttcaactggcacttaataatccaactaaacaatatttattaatttcaactgatcctgcacataatttatctgatgcatttgatcaaaagtttggtaaagatgctcgtgtagttgaaggtttagataatttatcatgtatggaaattgatccatcatcaacaatggaagaatttagtgcatcacaaagtgattcatctgatccaattaataatgttttagcagaagttacatcatcaattccaggtatcgatgaagcattttcatttatggaagttttaaaacatattaaaaatcaaaaatctgatgatgaaacaatcgttaaatatgatacaattgttttcgatactgcaccaactggtcatacacttagatttttacaattaccttcaactttagaaaaattacttggaaagtttaatgaaattacaggtaaaatgggttcattactttcaatgatgggtggtgatcaaaagcaagaaatgtttaataaacttgcagatattaaggaacaagttacagaagttaataaacaatttcaagatcctgaattaacaacgtttatctgtgtctgtatctctgaatttttatcactttatgaaacagaacgtttaattcaagatttaatgaaatataatatggatgttaatacaattattgttaaccaattacttttcgctgatgaagatgaatgtaaacgttgtcaagcaagatggaagatgcaaagaaagtatcttgatcaaatggatgaattgtatgaagattaccatcttattaaaatgccattattaggtaatgaaattagaggtttgccaaatttgaaaaaattctcaaaattcttactcaccccatacgatcctataaaggataaggatgttgtcttttcaattgaagagagatagattatcatatataagcatatagaggtgtatataaaatcaattccatatatgtatttttgtaaaacttgtcatttaccactaataattgatccatcattaaatttatcaaatgcacaacagaatttaacgcttaactataccgcaaatacaacatcatcgccaccttcagttataataccaaaggacagattagataagtttaatactgcaattggtcattcatttgtatatttgaataaacatgacgatcatgaaaaaccagaaataagttcaagaattgataaatcagaaaatatattcgatataatatcatctaaatatgatattgattatcctgtatgtaatgattgtgcaatttcactatcaaataatatgaaacataagtatgaaacattaaataatgagaaagaagtgtatttacagtttttgaaaaacttaacatcacaaaatcgtcccagtaaggggaaaatagaattgacattagaggaacttgatacattgaaacaaaatgaaaatgaattaatgcaacaaattcgaatcagaggataaattacatgaagagctaaataaggaaattaatagtttaagcatggaaatagatgaattaaagagcaaagagttagaacgatgtaaacttcaaaaccaattacatatggaaaatacagagaggttaaacactattgataaactgcagaatgagtttaattcaaatatggatttccttgataatttaaggaaaactaatgttttcgataacttctttgaaatatcaaccaatggtcaattttcaacaattaacggtctaagattaggatgtttatctgatgttaaagttacatggcatgaaataaatgcttcattaggtcatattacccttttattatcaacatgtcttaatattttagattttaacttacaagattataaactaatacccatcgggatctaattcaaaaattgaaatctataaaacaaataaaaaattagtatatcagctatactccacatcggagttttcattaactaacttattctcacatccactcgatgatggaatgttagctttgttaaaagttattaaacagataggcgattatattcatacacttgatacctcattcattctcccctatgaaataaataacgatactattgcaaattatcctataaaaccatcagcaaaaagttgggaaaattggactgctgcttgcaggttactgttatctaatgtaaaatggattcaaacattttgtattgcacattatgaaaatatcaaatgataagaaaattaatgatataccatttcgggtaatgtaattaataattattctacatgaaaaaatttcatttaaatgttatttcaattattaataatgataatataagttctttctttttgtatagatatatatatatactcttagcgaacacacatgactgagtgtcgagttaagacatcagatggtgtttatttaccatttgatatagacaaactttgcagcatccctatcggagatttgtgtcagccgacatttggaaaacgttgatatcgctgacggagttagtaaaatccagtccggattaccagatgaaatatcaatagaccaactggttaatcttattgcagaagtatttgcatctatgacaaccatccattatgaatattcaaagcttgcatcagttgtattatcaaaattattacataaaaaggtaaactctaagttttcggagaatttcaaaactatccatcatcatgaatactcaaatcccaacaggaaaaagaaaagtttattctctgatgatgtttataaatcagtcatggaaaatgcagatatcatcgataaggccatagttcactgagagagatttcgatattgattattttgggtttagaacattagaacattcttatcttatagttttggaaggattaatacatgaaactccacaatatctatttatgcgtgttgcattaggtatccattacaataacatagatcttgcaatagagacatatgaattaatgtcgcaaaaatacttcattcatgcatctccaacgttatttaattcaggtatgaaaaatccatttctttcatcatgtttcttattagcaatgaaagatgattctattgatggtatttataaaacattgtatgacacagcaatgatatcaaaagcatcaggtggtgttggattacatatttccaatattagagctaatggaacttacatcattggatcaaatggaatatcctcaggaattgtaccaatgttacaaacatttaatgctacggcaagatatgttgatcaaggtggtaataaacgccccggtgcattttgtgtttatttagaaccatggcatgctgatatattccaatttttagatttaaggaaaaatcacggtaaagatgaaatgagaactagagatttattcttggcattgtggataccagatttattcatgcaaaaagtggaaagaaacgaagaatggtgtttgttttctgaagacatggctcctgaattaagtaactgttatggagagaaatttaataacttgtatgcaaaatatgagcaagagaaaatatttataaaacgtgtcaatgcaagaaaattatggcatgcagttttagttgcacaaacagaaacaggcaatccatttttattatacaaagatagatgtaatgagatgtcaaatcaaaagaatttaggtgttattaaaagctctaatttatgttgtgaaattattgaatattcatcgcctgaagaaactgctgtttgtaaccttgcatcattagcattaccaacttttatcaataatggtgtatttaattttgaaaaattacacacagttgctaaaatagttgtaagaaatctagatagagttattgatgtaaatgaatatccattagaaaattgtaagaaatccaatttgaaaaatagaccaattggattaggcgtacaagggcttgctgatactttcttcaaactgggatttccatttgattctgaaaacgcaaagaaactcaatattcaaatttttgaaactatttatcatgcagctttggaacaatcaagtgaacttgccattgaaaatggcaaatatgctagttatgaaggctcgcctatatcgaaaggacaattacaatttgatctgtggggagtggagccgagttcattatggaattgggattcattaagatgtaagattagagagaatggggtaagaaattcattattagtggcattaatgccaactgcatcaacttcacaaatatttggatttaatgaatgttttgagcctattacatccaatatttacataagaagagtattatcaggcgaacatcaagttgttaataaatatttagttaatgatttgatgaaattggacctttggaatattgaaatgaagaataagattattagtaatgatggatcaattcaaaatattgataatataccagataatatcaaagaattgtataaaacggtttgggaaatttcacaaagggtattaattgatttatcagtagatagagcaccatttattgatcaatcacagagcatgaatttatttatgagtgatgttacattttctaaattaacgagtatgcatttttatgcatggagaaaaggtttgaaaactggaatgtattatttacgtacaaaggcagcagcaagtgcaattaagtttagtttaagtccaatagttagtagaaataaaaggaaaatgaaaacaattgataatgttgtaagtaaatttcaaaaagttacacaagcagttgatcaaagtagtgatgatgaaactgataactcatcatataatattttcagtaagtcggtgataagttgtaatttaagtgatccagagaattgtgattcatgctctgcatgattgtttgtatataaagcgaagacaggattctcagttgcgtgtaaatagtagtatataattaatgtaacaacaataaagctttgaaggatagatgaatgaatggatttagataaaaaatattacaatatataatttggttaaataaattacttcttttggaaatctaatttaaatgtaacagtttcagctgaaccactttgaaccttaaccttttcattagcagctggtaaatgatcagcagtccaactatcaagaccaccataagtcaaataaccatcagaggaaagatcaaattgagtagcagtaactgatgaactacaagttaaatcaccactaacaaaaccacaataaccctttgaagattttaagttataaccaccaaatggagcggtttcaagatgataagttgcacaagtaccaccaacaaaccaagagccatcagagattaaacaacctggttgaccttctggtgataaataaccattaatagttggttttgaagaagctgatggtgaagcggaattacttgcagatgaataattattctttaatggataagaaatttgatcaggacaagaatttttaccaatataatcaattggttgataatcaccattaataacacgaccctttaagtgataataataccaaatttcatcaattgcaccatttttatcacaagcaaagtaaacttcagcaccgaatttagcattaagagcagctgctatatcagttttagcatatttaacatcatttgatggaacgataccagcatctgataaccatttatatgaaggtaaattttcaaacattgaagtaacttgtttaaaaaattcaacagtacctaaattagttgttttatcagtgaaacaatcaggttttaaagttgacatacaagttgcatgtttattaaattcatgagtccaaagatcatcatcattaccttgataatctttccaataagtattcataaaatctaataattccgtttcattaaaagattgtaagactgatttaattgaattaacattcattgaatcatcacaataagatgaataagaaccatcacaattatctggccataaaccatgaattgtccaactatcatttggaccagttgaagggttataatcccaaaattgagtttgaagtaaaactccaccaggtgctttcaacacaacatgaatcaactatttgaagcatcagttgaacaagataatggtaaatcaaaaggacaagatttgaaaatacttggtaattgagaaggaactggaccagcagaacttgaaggttttaaagatgatgatgaatttggagctaaagatgacggagcggatgagtaagatgttgcagcagcagaagaagaagaagataaagaagaagatgaagcatcagcaggaagagtgtaagtgtattttggacatgaaggtggttgatcataggaagagacaaatacagcattagcagaagctaatgatagcaagatggagcataaagtttgatagttcattgttattctatgataaacaaaaagtgaaaaaccaactaaagaatcaacggtttcaataagtgggaatccgccatgtattaaatacttgtaatcagtaacagttactgttacaattgatacaaagacacggttactaaaacaataacatcaaaatgtaaataaataaatacaaagaatgaaaagaatgaaaaaaatggaaaataaaattaaagataaggtccccccacctgcaccagttaaacgttttacgtcaacgtgtttattacttaagtgttttattatatacttttactatacttttattatacttttactatacttttactatgataaatacaaatgaaaaacaacatcaccgtcaattccaggacgaataccaacctgttggaaacggccagggactttatccgcattccatttactttcacctccaaaacttatccattgtttatctttatccttattataggaaaattgcattggtttaacattaggtccacatgtaaatgtaccgtctgtatcacttactttacaataacccttggaagatttaatattatatcctccaaattctgccttttgtaacgtaaatgttgcacaactacccgatgtataccaattaccattacttataacacatcctggttcattctctaattttaaatatcctttaataccatcctttggtttacctggtggatttggacctggtggtggagttggtggtttaaatcctctttttggtataaatttaataccttcatttggacattgtgaattaaccattgctggtattggcatatattctccatttataactgatcctcttaaatgataaaaataccaaacttcttgtaatgcttgatatctattacatttaatataaactggttgtccaaaatgtgcacttaacgtatcctcaatttgttgtttactatatgtttgttcatttgatggtataataccattatcacttaaccatttatatgttggtagtctttcaaataattcaacacttttcttgaaaaaatcaacaacattttgattttttttatattcaccttcataacatttctccttaattgtactcatacatgttccatgcttattaaattcatgtttccataatgattcatcatctccattataatttttccaaacactttccattttctctaataattcatactctttatgttcctttaatatatcacgtacattatcaatttccatcgatgaatcacaaaattgttcaaaagatccatcacatttatctgaccataatccatgtaatgtaaacatatcatctggtccaattggtggataataatcccaaaattgtgtttgtaataaaactcctccatggattttcaaaacaacatgtatctccatcatatttctcatcagtacatgtaaacggtatatcaaccggacatttctttaattcagccttcttaaattctaatgttaatttatcatttaacaaacctttttcaaattcagcatattcaggaatattgagtgaatgaacactgttaatcaatactaataacggtaacactcaacttcatagttgttaaaatagattatcaacaagggcaaataacgtaactttgtaaaagaaagaacatgaccaataaataaagattggtaatctcctcatcaccaagttagtaacaatagaatacttcaaatctatttttataagcttcgctgctctaattggatattgataagataagaaattatttcatcgatatttttttcatcttttatcttttatctttttatctttttatcttctattttactttatagattatgtatttatatttacacaaattacacctgaatggaacatctattcatcatcctcatcctcatcgtcttcttcatctatctcaatttcatcatcagatccgaaaacattcatagttttcttaccatttttagcatcctttgcatcagcttctaacgattcccttaataattttaatttttcatcttttactaatctttgtgttgcaatatatgcaccaagtggagttttcttccaatcaacatcttgtaaaaatttacttactgcaactttattctttggtccatattcaattttacttctttctttttcaatatatttactatttgcagttaatttatcaattaatgtattcaattgtctattgaattttgcattattctttgctgcattattctttttaagacttcttctaaggaaaattaatggtggtgttgttaattctgggtatgcagcagatttacaatataacacaaaatattcaccaattaattcaattaattcttcacaaactccatcaacataaactcttgtatttaaataagctttattaactttaatattactctcaaaatcaattgctggtaaattttcacgttttggaactcttgaaaacatacttgaatgaagtatttcacttaataatgggaataatggaatataaactccagtactttgtgataatctaattaatgatctaattaaataaaatcttaatgggaaaaattgtgcagtgggaattaatttaattgtaccgatggtaacttgaactaatggataaattaattgttttaattgtgattcttgatcatcatctgccttaacttgaactgatataactcttgaccaaaaatctaatccatgacaaaatttccaattataaattgctttataactatcctttgttggtgcattaacacttgttcttaaatgaattgctaattgtctaataaattcaaatccaatttgatatcctaatacaggatttaatccaaataattcagccgctgaatttttttggaaatttaataatggtgttgtatgaatacttgttttaccacaattctttaagaaatttgcatatgttgatcttaaaacaatttctagaacggattttggatattctttacatgcattattcatccatgcaaatgctgaaatttcagtctctaatgaacctgatgaactccaaattaaaacaatcgaattaacaattgcctttaataattttctaaatgaaattaaatatggtaataattcttggactgattgtaaaactaatgcacaagtttcagtgtttgatgcatcctctaaaagtgtaattaatgatggtgtatgaactttaataattgttgataattgtgcaactttctttttattacctgaaatatttctaataccattagatgaaactttgaatggtgtgattttttgaactgctaatggaaaatcttgtaatacaacaaacattaaatttttaaaagctttttcatctttaacagtatatttgaaaatatcatcagaatctgaattaattgctgatttatatgcgataacaacattttttaatgtcttaattgatggagtatctgattttaaatcatctgaccatttcttaactaattgaacaccaacttcaatagattttttattccttagtatcgaacatccatcttctcagtagaatccattttcatttgatccttcattcatcatcatcatcttcttcatcatcgctaattgcatctaatggattaacaggattaaaagtctaataaatctttatcattattctttaaatagttatagaattcaggatcatccttagctaatgcatccatatcaatatcattttcttcatcatcaacttcttcctctgatgaagatgattcttcttcttctgcttctgcttcttcttgctttttagtttgtttcttggtttgtttcttttccttcttcatttctggaagtttatcatctttttcaaaatattcttcaacatctacatcatctaaaactttagcattcttttgatttttatcaactggtccatcaacgactgatccttttttaccaccttttctttgtgcaattttcttattatgttcttgaactctttttctttcttgaatggtatgtttcaaatgtttcgattgaaacttcttggtggattttgtagctttagccatgattttccttgttgattgattaattcaaagataaaagtatagtataaaagtacctttctttagctgaaaaattattattttctaaaaattttttttttcatgcattgcataataaagtggaaaaaataaaatattttttttcctgcaaaaggaaaagtcgcgtctggtaggtgatggtatctttttagttgttgttactgagcctgaatcaaagatcaaattgttattaaagacattgggtttatcttggagaaaggcgtatatacaagcaataattgatggagaagacagaagatatggtaagcaatgttttatcaaatgaatcattggagtcagaggaaacttttgctaaacaacaatatctatatggagaaataaacccatcaccaatgaaacacgaaatacatgaagatatacccaaattaaacactaaattaactttccctaagcaaaggaagagatcaaacacaatggaggcgaaatattataaaatctccggtaaggaaaacttgggtgttaggaagaatatgaaaagaccatcaacttgtggtaaagaaggtatacgtcatttttcaactccgttacctttgagagtaagtttacaagatacaaatataccacaactttcaccaaatactaatataacaaataaattgactgacttaagtagaaatgatgatgatgcctctactgaaattgatgaatctaatctaagtattaatacaacagattcaaattcctcaataaacctttcatttatgacaccaaactctataaattttacatcaccattatcagtaaggagtttttcaactccattagctgacatacgtgaaaagaataaactgaaaatgtctgttcagcttaaactaaatcaattatcaaaggatgaatgtaatgatgagtctaagaggcaaatacagagagagatactcaaattaaggacggaagttgaagttatgaaaaaagttaaaaaatatagagattctaaagaatctgaaaaaatggatcagttgatagaaaaatggaggaatattgcacaaatggcatcaaattatatgcttaatgaagcgagatataaagttgaaagaatgggtggaatgagtgaattcaggaataaacagaaaaaggcaaagttacgtaaaatgaagtttgaatttgatgaaagtttactttatagaatagaggaatatatggaatctgaagagtataaaaacttggataaatatgaaaaagaggaaattatatcaagaaagaatgagctggaaaaaatgagtgaaatgatagaaaatggaagataccctggtgctaatgatgatgatgataataatgataatgatggtgacgatgacaaagaaactgatgaagagtttactatggaagatctatataaacaactaaaattagattatgatttagtttataaatccaactaaggtacatacttctataattgaattgtatttataattaaagttttttgctaaatacttatcatattgaaattttctaattaattctataaacattatacttaaaagacatcaccgagttttaaacgtggtgcaatattcattgaaatcaattcttggaataacaatttagccgcatatggaattgtcatctttataattgtttcactagttttacaagttggacaccaaccattatatcccattaaaccacatgaattacaaacatcaacatcaaatgcatctgaacttaacattaatctttcaagtaataattgtgatgcaccatatgcaataacacaatctctctccatttctcccaatctcaaaccaccatctcttgatctaccttcagttggttgtcttgttaaaacagctctcggacctctagctctggcatgcatcttatctaaaaccatatgctttaatttttgataataaattggtccaaagaaaatataagcttgtaaacattcacctgtaataccactataaagcatatctttaccactataattgaatcccttatcaactaaaatttttgacatatcctctaattttgaaccaccaaaacatgtaccatattgtaatgagccgtctaagacacctgccttacctgaaactaattccaacattttaccaacagtcatacgagatgggaaaccatgaggattcataataatatcaggacatacaccttgatcattaaatggcatatcttcttgttgaacaataataccacaaacacccttttgaccatgtcttgatgaaaatttatcacctaattcaggacgacgtgtttgtcttaataaaactttgattaatgcttgatcattatcactaactgacatcataacttgatcaatataacttgcctctggagctcgataaaccattggttgatctctatgtgtttgttgcggttgttgctgttgttgttgtggattatcatttaaaacactttcagatgcattagttggaacacatttattaacataaatttgtccactttgaactctcataccaacttcaccaagaccatctggtcctaatgcagtatgttgccaaattggttcaccatcatcattaactctcatacctgctaatatatcctttgaatgatttggatatctctttaaaattgcagtatttttacggaaaacttgacatctaccaaaacctctatcaattgaagatttattcagaacaagggcatcttcaatatcataacctgaatatgacataactgcaacagttgcattttgacctgcaggtaatttatcatattgaatcaattcaattgttttagatttaaccatgggttgttgtggataacacattaaatataataaagtatcaattcttctgaattgattataagcaattgcaccaattgcttgcttacccatggcacattgataagtatttcttggagattgattatgatgagggtaaggaattaaacctgcaactgcacctaaaactgtaaaaacttcaatttctaaatgagttgttgcattaattatatctttttcatataatgcaataagagaatcattttcttcattaacatctaaatattcaactaaaccattaactaagaaatcatcaaattgccattctccatttttcaattttcttagatgatcttctttgacttttggtataccattctcaacaataattaatggtctacaaattctaccaccatcagcagcaatgtgaactgaactttgatgaacattagtataaattgaaacaaatgctgaaactttacccgttcgtcttaaatatctaaaagttgtaacaaatttatttggaaatcttgtagttgcaattaatgtaccattcagataaacaccaaatgtaccatgagtatgtaaagttgaactgtcagcaatactgatattttctgcacctaaaatataacatagttttctaattggggtttcttcatcatcagttgtaatatgtgtcattaaggctaaatttttaactaaaccacacgcttcaccttcaggagtatctgaagtacacaacataccaaattgtgaaggttgtaaagctcttggacctgacacttttctagatttttcgaattgtgatgaaattcttgtcatcatacctaatgctgaaatatatgataatctacttaaaacatgtgtaacacctgccctttccatcttgaatctcttcaaagaccaattacctgttgaaatggctctatttaaaccagttgtgatattattagaatgaatattaatatgtaataaagcgtcaaattcagaagctctacttggttttttcaaaatcttatcaagattcattttgaagtcattattaaatttcttgaataaatcttcaaataatagagacattaattgaccggctaattccaaacgtttgttaccaacataatctctatcatcaactaattttgaattatgcattgtcataacaactcttctagtcataattgcaatatataatgccttttcacggaagtctaaattttcaactgataaatgtgcaataagagttgatgcaattgcttcaataccttcttgaataattgttaattttggagcatttaatcttctaatagttttaacttttctaccgatatattctaaagcttctctttgagtatagacacctaatttagcagtttcttcaaaattaacagcaaaaatatcttgataaacagaatcatcaccacaaactaattgtaaaacttctaaatcggagacaataccagcagctttcaatacaataacaattggaatttcctcactaatagaattatgttttagataaattttatcatttttagtaacgacatatgttttagattttctttcgtgtgtagaagatgtaactgatgcttgaactataccctttttatcatcagattcaacaataattctatttttacttaattgttcttgaactaagatgactttttcagtaccattaacaatgaaatatccaccaggatcaagtggacattcatttaaatatgccatttcattttcagttctaccattaaggacacatttatttgatcttaacataattggcattcttccaatttctaaatctctatgaataataatttttctacctcttgtatattcaacatcaacataaattggtgcactataagtcatatctcttagcctacattcatgaggtggatataaaacttcgatttgctttggatcagctttacttttataaccaattctaatatctaaatattttaaatagaaatcaggatcaacatcacttaaaactttttcatttgcttgtataattttctttaaatccacatcaacaaaataattataagagtctaaatgttgtttaactaaacctttaacctttaaaaaggctggtaaaagattccatttatcttctgcagtattaattggatcagtgagagattttcccttataaacagggttgagaagttcatcaaatgactcttccctttctcttttcacaccggacattgtctaattgagtgttttcttagtctggagatacaaatataaatgaaaaactggagaattcaaactataaatcccaaatcaacagttccaaaacctaaatcaaaaccaataaattgtgatattaatcatcaaaaaaattcatgttgatttttagcagtgtgaaaaaaataaattttttttttactaagggaagctaagagaggttcttttcgcaattttcactctggtttcggaattttcaaaggtttcttttctgacatgaacaatttcaacttagagtgtctgaactttaatgatgatggtgatcgatccggtttctttgatataatcgtaagtatattgattgagatcatcatatactaacagcaacaccttgacacatagacaatggcatctgcacaaccacctgggagtagttcctctatgaataatgaagatacttcagttgatttctttaaatcaacaattaatgaatacttggataatttacctgaaagtgtgcataatcaattatttcatgctagagaaacatgtttagcaattttcagattattaccagcattatctaaattctatataatgacattattattccatgaaacaagtgtaccatattcagatttaaatcgatggataaaattaaataaaatgaattcaaagcaatcaatacaacaaaatcctactaaaatttatcaaaatgattcaataaagagattaaaatcattacatatcttaaaagagattaaaaagcaaatgattcatccaataactaagcaaccgacaattattatatttgttcaattaaatgaaattttcagacaatcttttagggatgtgcttacaggttttggtgatgatggtttaaaggatgctagtcaattaactataaatactgaaaataataatgaagatgttaaaccaagctcaaatggtggtttagatactatatttgctgatgatgcagataataagataacaattgaatatttagataaatattgtctttccaaatgggagaatatattacattttatggttggtacagaaatcaaggaaattccatcagttggcgtcttaacattattaagatttacaggattaatggaattaccatcagataaggaacgaagggatttgatgaatagtgtaatggatgatcatgatattgatactgaatataatgaaggtaaaactgaaaaattatcaattacaactttaagacaactgttaattactcaaaatgggtttcaatttttattacaagatattagttcacaaatttggactttacttattcaatatttaattatggctgaaaaattacaaatgaatccagttgatgttcttaattttattttcttattaggaagtttagaattaggtcaaggttataatattaatatgctttcaaaaactcaattaattatgctggatgatttacaagattatggtttgatttaccatgaaaagggtaataaaagtttttatccgactagattagcaacatcattaacatcggaaagttcaagttttaaaaatgcatcaactgcaattgatcaagaaatttctcaacctagaaatgataaaagtacaaatgttggatcaattattattgaaacaaatttcaaaatttattgttatacatcatcaccattacaaattgcaattttgaatttatttgtaaatttaagagcacgttttgcaaatttagtcacaggtgttgttaccagagattcaattagaactgcattgcgtagtggtattacagcacaacagatcattaattatttagagacacatgcacatacaggtatgattgaaatggcagaaactgaatataataaaaattatgaatttcaaaattctattggtaatacggttgcactggaacaattaaaattagaaattttaccaccaacagttgttgatcaaatcaaattatggcaattagaattagatagagttgaatcattcagaggttatttatataaagattttagtaatgattttgaatttgaaaaattattatcatatggtgaagaaattggtgttatagtttggaaagataaaagtaaacgtaaattttttgttagtcaagaaggtaatggacaattaattgaatatgcaaacaaaattatacgtaattcaaatacacctagacctgcaactccaatgtagtatatactttgtttaaattctttttttttttaataagttacttaaatacacaaaaattaactatgttttatacaccttatttactgtcaactgcatcttcttcaacttcagtatctgtatcgatatcagtccatgatatgatatcgtcattatcttcatcatcttcatcatcactactttcatattcatttttaaattcaacacgtttaacagattcaccacgtaattgagccattgcacctgcaattgaatcttcatcaggatcttcaattccataaacatcaactttagatttttcaattggtttatcttcaacattcataactactggaatatcaatatctgaaccaaaataagttaaatttcttaagataagtctaaaatgatgaacgccaacttcttttggagttggagttgataattgaattttaaacgttgaaatattacattttgattccataaattcatcttgtgttaaatttatatttgaaagatctgctttatttaaaattcttggtgcttcaattattttattatctctttgtgatacaagtaatgcaatccaacctgaattttgttcaatatatgaagtatctgggaaataaggtggaattgaaagtaattcaacattaggttgtaaattaacaactctcattggatcttttaaattatccattgattgttcctccttgaattgattattaataacatcttccttaaatgatttaaaatcgggtttacccttatgagcaggtgatttaattaagaatttcaaactaacatgagctgctgacattggaggtaaatgatcttcacctggaactttaaatttacattcaattggttcaatgattggaattttctttgaatagttaataattgtatcaaccttatctttattaaggaatttttcaggtgtaacagttttgtttttcaataatttacctaatgtgaggattgattgatttgtatcaatcttggaaacatcaacaccaggtaattgtaaaatttccttgaaagtaaaatgttttgcatctttttcaatattaagagcttgaataattgatctatgagcatcaacaattttcaaacaataatcagtatttttaaaagcagctgcaatttcaagaaatgaagataatagttttaggtgtaattgcaacaacattaagacgtaaattttcatctttacaggtttctctattaatataagaaattattaacttgtaaaccgtatcaggagttaaagcagtattaatatttaaatattcaacagaatgtgatacttgcttaattatatcatcaactaataaaacatgagttggacttgcattgattaataatttcataaaatgatcagcagttgtaacatgagtaccacttttagttgttgatttaacaccattccaccaattactaactaataaaggtaaaacaattgcaatgaaggcaatatatataacgacaagaaaagggagagaatgcaccttcaattaagaaatgaggtaatgcaataccatgtttaatttcaactggaccatcaggattaccatattttaagaaattttcacgaactgtttcatcagttaaagctttgtaagctttattaattaaaacataagcagcatcaacagaatcaatttcttcttgagtcattgaagaagtatcaactttatcaggatgatatttaagtgataattttctataagcagttttaattatcttttcagttgcattttcagagatttctaatattttccaaggatcaaaatgattttctgataaaattgtttcagtatttgaaattatatatagaagaccagaaattaaaatccaaccaaaaatagttaataaagttttcaaattaaataattttgaacgattttgtgaatttcgaaaagattgtaaataatttgcattatatggagagaatgatgatttatgagatttatttgattttttaaataatgaagatataattgaaattgttgaaggaatcaaaggtactaaaattgcagttaatgcaaaataaggccaagtttctgaattctcatcgtattcgtaacgagattgtgacattttgtccttagtttttaaataaagagattgttgttcacaagatggaaaaagttgaaatttggtgaaatttaaaacttacacgtttcgctttatttaagttaggatggactagagagaaagagagagagagagagagagagagagagagttcttttctttgagataatgaaggtagcatttgttagtttgatatcaagggatggtagaccattatacatttataataacggagagatggaagaagatgggaaaggggaaggggaagggatagagaattttcttaaatataatttcttatcacatatgtcattagatgtatttgaatcaacctatgcaccaaatacaagtgaaaaacctggacttttatttgttcaagatggtgttttcatttatggatatgagatgtcaattggtgttaaagtagttgttggtataattagggataaaataactttagaggaatggaatgaaaaagatttgacagaattagattatgttaaaaatataattgatggagtttgtaaagaatttgtacgatacagttgtagttcatttagagaaggtccaatagaggaaattaatagtaatatatttgataaaaggataagtaaagttattaatatataaaggtatatagatctatataatgattatttaaggacaacatttgcaccacgtaaagaaaggtattgctgatcaacacctgaaggcatatttttaacaatttcataacattccttatttaaataacgaatttgattatgaggtgatttataatttgttggtaaaccagttatatcacaataagttttaagtggtttaattgaaggtggagctgaaattgtaaaataagttgttgttggttgtttattaagtgaatttagacgtcttgtttcttcattaattataagtcttgcacctttatatcttggatttttacgtttatgttgagttttaaatttatatccagattccatttgatttatatattcctccatcgttgacattgttgatatggatgtattaaaagagtatattaaaagctatatactctggtttactcttattataattgttaaaataggaaataatacgaaaaaaaaatattacgtaataatactaaatctattttaaactataaaaggaatgagaggatatatatagcaaaatgcatatttatgcacaattataaacattgataaccaccatcaacgataatattttcaccagtggtataagaggaagcggaattagataaaagatagagaacagtacctgcaaattcatttggatttgccattcttttcattggagtaagtgacatccatctattaaacatttcagtattaccattaataacatttttagttaaaggagttgcaatataaccaggagataatgaattaattctaatattatatttagcccattcaacagctaatgatttaaccatatgaattacaccagcttttgacatattataagcaatttgaggttgaggatcattaacaattgaacctgacattgaagcaatcattacaattgaagcattttcaattttattattaataattggttttgcgaaagcttgtgcaacatataatgaacctaaaagattaactttaattaattgttctgcattaattgaaggataatcttcagcagggaaattttcacaataacctgcagtattaactaaatgaaggggaaaggttccgaaatcagcagttatttttttaaaagtctcttcaacatcaggtgaaattaccaatatcacaagtataacattcaacttttaattttgtatttaatgaggcttttcttactaataaagcatccatatttctatccaagagagcaagtggagcaccatattccaataaagtgtgaatgataggttcagcgagagcaccggaagcaccagtgatgaacagtgagttcgttagttaactcaaacattgtttagataatgagaaagaaaagtaatcaagagcaaagttcagtggaaaataagaatatagcaatggaaagtcgtctccttatataacaaacagcagatgtataaaaagaaaagaagagaagagataacaaaaagaaaagaaaagatcaaaagaaaagaaaagaaaagaaaagagagggaaactccgaaaataatcgttacgtaatggttttctaagtaattagttcatcattaccacgttcattattaatactttacaccacttctttacttttctcttatggtcttttcttttgacaaatcaactatggatccatacaaggacaactagcaccaactgttattgctctttcattcacagtatcctctgcaactgcatttataggtttaaatgaacttgaattaccaccccaattagctaatgggggtcattatcaattcttaacaaatattgcactactgctttcaacaatttattcatttgttaacattttatatcatcaaacatctataagtggtattaaaccactgaaaattcatatgtcagcaatttgtctttctttaaatgtagttgtttcacttgtttattggtcattgaaattatttataccacatttaattatggctgaaaaggatggtggaatcccattattattggatattcaaattcatatgatacctctattaactgttgcaattgattatttttgtttcatggaaagatggaatgtgccatttttaagagcttatgcgattgtggcttcattgacaactctttattggttttggcttgaatatttaataactgatgatgcaagttatccttatcctttcctcaatgttgaaaaaaatttacgtataatcatattcataattgtttcctttattgcattctctgctttcgttgttggtaaattattacatccacaatttatacccgaattaaaggaagctgagaagcatgtgaagaacaattgatctgttctatattatatattatataccactccacatgtcatgtacaaaaagacaatttaatgattaaagacatcttctataacaaaaaaattattttataacttggtttctgcttaaaaaacctaatcgactcttttatcaattttcacttactactacatacttaatttttaatgacaaggtaatgaaaacaaatttcactgcaatacacagtaaacctaaaagtctgtagacgataaggaaccgattaaatcgtataggcactggagataataattctcaacatgaaaaactaaggtacacgaattttgaatattggattacgtgatcaagtacatctataactattcaaactagtgttaaaatcagctctaattgaaagtactacactctcttatcttttttaaattgagcgttagcagtactatcagaaagaaaaaaaaaatttatacaaaatatcaaatattttttttattagactttcaaaaaaaagttatctctattttaatactttttaccaaaaaaaaagagcaaaaattgaacaccttaaatcataacactagtttcaaaaaacattttcaaaaagatgggtgtttgagttctaaactatttttaaccagtataagaccatcagtaacactggtgaataaataatagattcattagaaagaaaaaagtttaatgtgaaacttcatcagagcagaatttttaatttcactttagttattaaatgagtgtaaaaataatttataacgttaataaatcatattaaacaactcatctttcctagatacagagacttatatgatactgatttaagcacccaagtattgtagatcttccacggaaattaattgaaattttgtatagagtagtaaactttaaaccttaataactcaatcaattctcgatactttcacaaactaacaccacagttgcttgattcagacaattctctatctatacctgtctaacatgagtctagatacaggtctaaaaaatttcagagaaaatttgaaaaatcacaatttcgagtattaggaagtattatatcgataagataaccttttatttgttatttcttccggtaattctttcctaatattgaccagacctaattattgattaaacgataacgttttgattaatcgactctctgctgcatattatgtaatcaagctttctaaaaaggggttcttgtggcaacaaccatttagtgtataaaggggtataggagatagagggtgtggaaatatgcagatacgcagattataatcacaaattaaattaaattaaattaaatttgtcacatagcaacctatggatggaattgggtttgcttgccatctatttattaaatttattgcaaattgattttctaatttgatattaaaatccttatataaccattgataatgcttcaacactttccaactccttaacttttctttccattttttttttttttgacaatcaactatggatccttataaaggacagctagcaccaactgttattgctcttttattcacaatatccactgcaactacatatataggtatggatgagcttgaattaccacctcatttagctagtggaggtcattatcaattcttaacaagtattgcagtagttttttcaacaatttattcattttttaatattatatatcatcaaacatctttaaatgttattaaaccattgaaaattcatatgtcagcaatttgtctttccttaaatgtagttgtttcacttgtttattggtcactgaaattatttataccacatttaatagctgaaatggatgctagtgtcccacttttggtagatattaaaattcatatgatgcctctattaactgttgcaattgactatttttgctttatggaagtatgggatgtacgattgtggcttcattgacaactctttattggttttggcttgaatatttaataactgatggtgcaagttatccttatccgttccataatgttgaaaaaaatttacgtataattatattcataattgtttcttttatgggattctctgctttcgttgttggtaaattattacatcctcaatttaaacctgaatcaaaggaaactgaaaaacattaaagaatgattgatctttttatattatacaatactctatgtaccatatttataccacaccatataccataaaaaggatagtatggaaagacatctcctaacaaaaaattattttaagcggcagtactaatttttatcagcattatttttgactatcatgatactttaatattacaatggactttttaacttatatattatatataccatctttttatcttttatcttttatccttgtcggttctctctatatatgcgcttattatttgctttaacggcattggtatataataccgctgctattcaatatcctttatcattcttatcctcaaataatgatcctgtattatcaattaattcatttatagataacttatctcaagatttatcagattttgaaatttcttccctaaatgataatgatatagcttactataaacaaatagaaccatcaaattggccaatagatttggaacaatattcaaatgattttgttataagattattcgattggattgatacagaggatgatataccattttatcaatctactttatcattgattaaggaacaacaaaatattaaaatttgggattcttcattagcatctaaatttattgatattcaattaaataaagatgtggctcaatatttattaactgaattatcctctcaatataaatttaattataaattacttataaataacttaccacaaacaatttttgaaacatacccacaatcacaattatcatcattagaggaggaagaaaatgatgactttataactaattcagaattattttttaaaacttatagagatattgattcaatatatgcttggtttgatttattagttaatacctatcctgatattttatcaatcgaatatattggtaatacatttgaaggacgtccaatgaaagctttaaggttatcagttcactcagattcaaaatcaaatgaaattaaaactgttgttattacaggtggtattcatgcaagagaatggattagtgtttcaactacttgttatatactttttcaattattacaagattatgaaaatggtaaagtttcagttataagatatttagaaaatttagatttccttttcttaccattaatgaatcctgatggttatacttatacttggactaatgaacgtttatggaggaaaaataaacaacaaacttttaatccaagatgtcaaggaattgatattgatcattcatttgatttccattttacttcaggtattgaatctccttgttctgatgattatcccggtgaatcagcatttgaagctttagaaagttataattgggataattatttaaatgaaacaaaacattcacatccgatttatgcttatattgatttacattcttatgctcaagaagttttatatccttatgcttattcatgtgatatattaccaagagatgaagaaaatttattagaattagcttatggtttaagtcagtcaattagattaaaatccggtaaatattatcaaatttttaaagcttgtcaagataaaggtgcagatttattaccaagtatgggttcaggttcagctttagattatatgtatcataataaagcatattgggcatttgttttaaaattaagagattctggtactcacggatttttattaccttcaaaatatattactcctgttggtaaagaaatttattcttcaattaaatactttgctgcatttttactatctgataaataaaattaattgtttttttaatctaaataatcatttattatataacttacttttaatcattgacgttaaaatttcataaactacttgagctgcatttgtacttgtaacttctgcattatcaaaacttggtgaaacttcaacaacatcaccaccaactaaatttaatctctctaaacctcttaataaataaatgacttcccttggtaacattccaccaggttcgattgtaccagttccaggagtaaatgcaggatccatacaatcaacatctaaactaataaatgttggcgaatcaccaattttatgataaatgttcgaaattatttcatctaatccttctctaccattaatccaaacatcatcagcggaatatcttgtccatccttgactggtatcatcatcaaaatcttttaaatcattacctgaaattctagtacgtataccaatatggaaattattttcatcattaattaattcttcattatgtgccatccataacattgaaccatgagtaaattcactttgattagaattccaataacttggataaccttttggtgaccaagtatctaaatgtgcatcaaaatgaataactgatattttaccataaatttgttttaaacttcttaaatgtggtaaagtaattgaatgatcaccacctaatgcaattaattttggttttccttctccatctctctttctattaattaataattcttcaaatgccattgtcatttgctttaatgcaattgaattatccattggagtaattggtatatcaccacaatctaaaataattgaaccattttgataaggattaatatttgctcttgtattaaaaccacgtaaagaagtttgtctttgtgatgatgatctaatagattttggcccaaatcttgcaccactacgatatgttgttgctgtatcaaatggtacaccaattataccaatatcaaaatttgaatctctatcaagtaaacatttactataattcaaatgtgcaaatgatgtaataccttgaaatggccattcttcaccccaaaggtcatctaatgtttgctcattaactaatggtgattgaatagctagtgtatttgatattaataatccaattaatcctacaatcttcattacttttactaagtataataacctatatatatatcatgtcagataacacattacataatttccttatcagtaccactaataatgactcccttatcagtaaactcccctcacaatcaaaaaaaaattaaaaatgtcaacccccggtggtatcacgtgcagcaccagcccttttttcccaaaagagcgaaaccttcatttcctcatagtaaaaaatcaaattcattgacgcactccccaaaaaaatattcattttttttttcagttggaatttttgaattttctctgctccaattacactctttttgactatagtgtaaaaatattttcattattattagattttttaacttgttagtataatttaattaatttcaaattcctttaatcttaatttgaaatcctttttatttaaccaaccaactttttttaacaatgggtagagttatcagaaaccaaagaaagggtgcaggttccatcttcactgctcacaccagattaagaaagggtgcagcaaagttaagaaccttagattatgctgaaagacacggttacattagaggtgtcgttaagcaaattattcatgatccaggtagaggtgctccattagctaaagtctcattcagagatccttacagatttaaattaagagaagaaacttttattgcaaatgaaggtgtctataccggtcaatttatttactgtggtaaatcagcaaaattaaatattggtaatgttttacctttaggttcattaccagaaggtacaattgtctccaatgttgaagaaaaagttggtgatagaggtgctttaggtagaacttctggtaactatgttatcattattggacacaacccagatgaaaataaaaccagagttaagttaccttcaggtgcaaagaaaattatctcttctgatgcaagaggtgttatcggtgtcgttgctggtggtggtagaattgataaaccattattaaaggctggtagagctttccataaatacaaggtcaagagaaattcatggccaaagactagaggtgtcgctatgaacccagttgatcaccctcatggtggtggtaaccatcaacatattggtaaagcttctactatttctagaggtgcagtttctggtcaaaaggctggtttaattgctgcaagaagaaccggtttattgagaggttctaaggataagaacgatgattaaatttagattatttgtatagtgtataacttactttcctctttgtcctttacttgaaaatcaatcgaaaactttgaattaataaaactttcttaataaaattaaagtataattagtaaattcagtttactgttttaaattaaatgaaatttgattaaacattacacaacattagcaaaaactaaaaaaattaaaacaaaacttattctatatatacctacatactttttactccacagatatcaattggaatcaacaattgtactcaatgatgtagatgttaaattattcttttcaataatattaacaatatcagttacatttgcattttccttgtcaatgatattaacattttcatttccatttccattttcattctcattttccttaacattcattttggaatcaacattttcatttacattcttatcttgaaatttattctttttaggaaatggattattcttgtaatactcttcataataatcatcagcttttttattccaatttgatttgtaaaacttttgctttggaataataccatttatatttaatgtattaacattattatttctgtaattatgttttgatctcatattgaatggctgttgataagtaattggtacataattaggattaactgctaaaaatggttcattgtacttatttgatttaaaatttggttgatttgcaaacataattggtgcttgtggtaatgatccatttacatagactaaaccattcataaagttacctggatactttgtatatttctttttattaaaagatttctttttattaatcttctttttttgagttccagcttttgattcttcttttgcttctttatcaatctttccagaattgacaattttttcagttggttcttccgtgatctttttttcaataacttctgtaatcttcttatcgttgtcgttatttttggttgagatagaaacaccatcggttttggaagcattagttgcattctttttattattgagctttttatgtttgaaatactttctcttgaaatgaggtttaccttgctttttggatgttactttagttgtactactttccgttttttccttggtttggacaattggtgattctactttggtattgttgattgcaggagctatagttgaatcaatagtttgagtggtagcaacattgttcataattaaattctcatcattgccttctgaattacattctacattgctggttaattcattaggagtaacatttgttactgttttatctgctgtagttatattattttccgttttggttagggcctataatgtaaataaattgttagtaactgatattttacaaggaggtagtttgtgtgtttttctttttagatcattacataccattgcagtgaattgtttggcaacatttgaaagaatttgagtgattttaatttcagtatctacaattggttgagaagttttaatttcttctacctcatctattggtaatgaattgttaagttcttcggacatgatttactctacagcggtctgttcgatataaaagaaagtaaatcaaaagaaattcagagaaaaaaaaaacagaatttaaacaaacaatcaaagagaaacaactgtttagtggcaaagatacaaaaaaaagggatacaaatgcctatttaattgactgttaaaccttgtaaatggaagcaaaactataaaatgtttcctaaaagagtaattaaaaagtatccccgtttgaggataagctgagaaaaaaagtaaattttcaggttacctaacattaagagtatattgaaaataaattaatgatggtttaacgatataattgatcaagttaacgttacgaaattaaacaaagtttttattagtttatcaagtgaaatacacaagctttaaatatactacttaaatttatttcttttcagcagctttctttgcagctaaagccttttgggtaccgtgtaaagcccatctgtggtttcttctgaactttgcatcaacaccgtttaaagatggatatctgttggtctttggcttcttgataccgttcttgtgagccttcttggtttggttatgtgcagtatggttcttggacttagacattctgtaataataaataaatttatcaaaatgataaaaaaatataaatgttagtatttcagctcttatatgaaaataaattaggaataataataataacgtagtcgaaatgcattgcaaataaaagtgtattgtatggattattaacttattgacatagactgtgatttgattgaatattatcagcttttgattcaatatgaacgcatattcaacattagttgattttctaaagtattgtatctaattatcaagcaattctcctgtctatcattatcaaatatctccctatatggtgtgtttcgtacatacgtttatcgttgtggtttaaaagacaaaaacgaaagtttcattaactaactgcaatttgaacattttagacagtagttaaaatttcttcctcgctctctacagtaaggaaattcatttttttttttcgcatttactcaaaattttaaaattattagacccagtgagacctctactaagttttattttatttttatgtgcggtttgaggatggattttgaatattctatagcagtcacaagatcttaatcaagtgaaccaactgcataaatcagttgatatactggtgctacaatagataggtaggatattaacattcaattaataggtatgatgtatattagaaaagctagtaagtaacggtagaaagatagagagtactataagtgttaaaacaggtttatagaaacagtaatgtagttaaaacaattattttgcagctgcaacagcttgagcagcaattttagcctttttagcaatctttgcttgagccttttgacccataataccaccaccccagtgtctctttgattcatcgaacttttcagtaaagttagcatttatagtagaaactaatttagctaattcagcttcatcttctgccttaacatcaactaaagctgcaactgttgcagttttttgatgaactaaagtacctaatctagccttacctttaacaatagcatatggaacacccatcttttgacataatgctggtaaaaagatgactaattcaattggatcaacatcattagcaattaagactaatttagcttttttgttttcaattaaaccaacaacatgatttaaaccgtactttaacaacgtatggtttttcagaagcttcttctctctttttaccttctgcaatagcagctgcttccttagtaagtctttccttcttttcagaagtagtttctggtctatatttgtttaataatttgaaagttgcagctgcagtgttcttatctaaagtattaggagaattgtgcaatagctggaggaacctttaatcttaatgataagattttcttttgtctttgaagtctaacatattcaggccacttaacatatcttgataagtttttctttggttgaattgcttgacctaaaccaaagttctttggtgctgcttcaaataatggatttttggaagcaacggatttggatttcttggtggctaaaggagctggtgcaacttttcttgaagactataataaaattaaaatagttattaaattaataataaaaagattgttagtaacttgctggtttaaaatactctagtaaaagataaaacaaaatttatttaaatgaatccaaataaatttcattcttctttgaaaagatcaacatacaatcaaataaatgaaaagaaaaatcaattaagatatcaattcaaatattcaatcatactcatataaggtcatcgagtacaagtcactaaaactttttgtaatataataacactaatttcatttatccgaaaagaaacagggaagcaaaaactgtaaaaagacatgtatagatataattatgaattcataattatctaaacaatgtacaaagaattattataggattcttaataagctcatgtaagaccattgtgaagattaaaaatcatcataattacacccacacatgccaatcacagatgaatgctttacctctaatattctttcaaaataaataaaaatgatattatattgcggtaattgccttcaaaagtatggaacaattagtgataatgtaataaaaatttatcaatcaatgaacggtacatgtcttttcagatatcctttagccgaaaattaaaactttttttaatttcaataatttcaatagttgatcattcagtacataccattatgttatgaatatataaagtgatttacttgtcaaaggaaagataaataaatatttgtgcaggaataataccaggaagaaagagttatcattaaaagactgaaaaatttttcacacgtttgacagagtgagtattttgaaaaaatggaaaagtttcaacagcttttcctgtttccataaaattcgcgctacttcccgattgggtaatctgtcaattttgttatcgcaagtttacatcgatgattgattgcaattaaatgattctttaaggatttgtaagttaaattgtatcctactttgggtatcaattgagtaaagtaggatacaatcatgggatttttgaacagtcatcaacgtacagctgttacatcaattattaatgattgttgtgatcaagcagaaccatcgcaggacgattattatatcgagtcacagttatcttcacttttagatgctataaaaaatcaaagggattttactgaaccgggagcagttgaagctgctagagctttgagaaaacaaatgaaatatggtaataacgttgaacaatacaatgctttgaagattttagattcattagttgtcaatggtgcaacagccaaatttatgcagcctttatttaatgatgataagctattggatagattgcaatattatttaattggtggtaagaatctgaatgataattcattttcgtctagggttccaaatgagagtggcccaaatcaacaattatctgatctaacatattcaatgatgacacaatggtataatgaatttaacgatataaacagtttaaataatgtgtttttattatatgaaagatgttcaaagaagagaagacaacaaaagaaaaaggctaacaagtcaagatccaataaaaatttctcggaagttcctgatttcatgaatgatgaagcagatatgtctactcccttttcaagttatcaagatgatgatgctaatagaccaagaactaatgctgaattagataagaagttcaaaattccaaaaattaactatgaaaaggaagcacctaaaattctacaattgatagcagaggctaatataatgtcgacaaacttattgaatactgtcaattctttacaaaaggatgaattgtccatacactcaatcaaggcgaatgatgcctttgatcaatgtcgtgcaattagaagaaaagttttgagatatttacaattagttcaaagagaagaactgttaggtcctcttctcaaatgtaatgatgatttggttctctcattaaaaagatatgaagaaaaatctgtgccagttggtactaaaattgataatgatgattccgactccgatactgactctttagcaaattatgaatctgatgatgcatctgttcttccaaggcaaaatgtgaggacaaatgattatgatgaggaagattccgattatgatgattatcacaatgatagagttgttcgcaatgaagagccaccaacaactgttgactaccaagtacctaaaaaggcaccacctccagttccaccaaaaagtagtatttttaagagttcaaagtttcaaaaaggttccagttctacttcgaggaatagtaaaagcaataataacgactatgatccattttcagatgtcaatgaagtggcacctgtatcctggagttgagttaattggggagaatttttattttttgtattcattcattatcagtgttttttcatattgtaatagtttttatctagatctatatgtgaactatgtatcagtattcagttattagactttaactttgctctttcattaatgattaatctaattggcgtaactgtaaaaaaaagattatgtaatcaacacaattattttttcacttatttacatcaagcttgttaatcgatatatcgacatgtgcatgttttaacaaaactcctttacatgtgattaatagcatcaggtaaacactgtcaacacatatccatcatgttttctagattaataagaccttcaataataacttctccaagtatatcatataaatcagctataagaaatttatcactaaaacctcgtcttccaaaattaccaaacttaaggttaacaccagatgttccaggtaatatcattggttcagtcaatgatgcatatgttccaccaccaggagatatcagtgttggagcatttcattggttatatgaaaaattagtcgttgttggaatgataccacttgttgtattcccatttattgcaggtgtagattacccattatttgatgcagctttaggtactttgacattattacattcaaggtatggtttacaatcatgtattattgactatattccattaaggaaatttggtttctggcacaaaatggctatgtttttattaaacataggtactgcagtttcattatatggtatttatgtgatagagactgaatataatggtttatgtgatttaattcataaattatggacagcttaatgaaaatgcttgttagatattagtatgtatataaagatgtaagtttaataaacaaacaaaattgaaataatttacagtaaaaatacagaataatgacatgatcgggtgatttatgttctatagtaatctaccgtctatagcgttttcttcggctaaaattgtcatctgtaggtagatattctacatcacctggataaacaggtatgtatacatcacatgaattgtaatcatctggatcacgcgttgacatcactgataaagatggaatgggtatgttacgtggtggaatggtataatttcttgataatggactcgggtgatttgatccaaatgtttctttgggtattctttcatcttcaataaattgagagttatctgcgtagctgtattcaggtgaaattgatggtgaattgttagagtttattgagctcggtgtaagagaaatactggaagtcacatcttctatatttgtatctatatcacgccttccactatgttcctgcaatctaagtaggtgaaatgacttttctctactaacttcgtccttcgaaactgcaatataaccagttgacttgttttcatagtttatcatagcatgaacggctttggggaaaacagatcctggattaattcgagatctgtattccttgtaatgtaccctccatattgcatctcgtggagcatcaagttcttgattaatccatgtttcaagtgctcttacgggtatgtaatcaacatatgttgaagcttcggatgattcaaatctgtaaccatttaatctatttcgtatagagaccgcacctggcacatcagatattaaaatatatgaatggcttcgtttaccattaatccaagctctttcaactgtacagttttctctttcagattcctctttcaaaatctctttgaattcattaatgtcaatatcgcagttcagattaccaacaaacaaagctctagttgtttgaaatgatgggtatcttttgtacttatatcgcacagcgttatcacatagatccctatatattactttcttcttcatataaacttgaccgtcctgacctattgttgtgtcttcagactcatcattatcatttgattgtcggctgttgaattcttcattatagtcgcttgtatttcgacttttagagacactatttgatcttaatatcggtaggcctaaaccctcaggcattggggaaataattggggttcactttgtcttatcataagagggctgtttacaatagaaaacagagattggtgctaaaaaaaattatattttctaaaaaaaaacatgatgcagagaatcttagcaaataatgggagaacgatatggttctcgagcgaccgcaattcgatgatgcatttgatgaaattttgcaatttttgataatatattgatggatgtattaaattaaaatacattgccctatatgaaagactgtatgtacagagatgttgtgtataaagtaaatttatatatagaaaggattggatatccaattgtaattagttctaaatggaaagataagatctattagcaatagccaatttatgacttaatactctcttatccattaatgaagatttaccacttaaaacatgtaagatttcatcacataatctaactgagaaatcatttgaggctttagaatctgatgacttcaatatccataggagagccattctatttctttgtctttgagttaatggaactggaactgtaaaattcttagcaaaaccagttttaacagttttagtaacaacaattggtgcaactaaatctaatgcttcttttaatttattaacaggattttctctagtttctaagaataataagtaaagtgctctattaagatgctttcttgcagtttccttcttaccatctttcataataatattaaccgcaagttctaaaacttcatctgtttgttttggtaatgctttaccctttaatgcttgtgcagattcaacttgttgtgcatctggttgaaaccctaataatttatccatagattctgaaattttacgtgaaggtgcaataaaagtattagtttttatttcattctcaagttcatcaattatttcaatagttaaatcatatgcttcattcatttttgcaacatcttctggtaatttagattgatcttcattctttaattctgcaagttgatcagcaattgaattgacagaagattcattttgaacagattcaacagcttcttcaatttcttctgctgcttcaatttcttcctttgcttcttggaaaacataatctgataataatttatagttaattgattctttatcacttaaagcatcagcaatagcatttggttcagataaataatcctgtaattgaccatacaacttcatggattcttcttcattttgttcgttatataatttagaaacaatttcagtgaaagttggatcgattctttctattaatttgaaaccatcactttctaaaccattgtgaattaaatattcaacaagtttatctggagtaacagttgattcaataattttccattcagcatctaatgaagatcttaaatttttgtacgattcagaatttatatcgttcatagcaatataaattggggtattgtcgtttgataagtaagcatcaatttcgtcattctttttatctaatgcttcaccttctggtaaagtttcaagttcaaccaataattccccgaattttggatcaacttcttggatcttcttgaataaactactggtaaaataatctggataaaattcgaaaacttcataaagttcagataaatcaattggtaatggttgctctaatactttcttcaaagtttggaaattttcagagcttgtatcttcaaaagattgaaaaattttagattctctattagaacagtaatctaagatttcttgatatttagcattgagttcttctccattggatgggtcaataacttcatatgatttaagtaatgttgcaaattcgttatcaatagtttcaattagtttcaacagtggagagttgttaatgttttcataattgtttaagttagagaagatagtttctaagacagattggccatcgattggacctgattcagttgcttctgaagtttcagttgaagattctgattctgataataaactctttaattcatcatattgtttatttgagattctggaaattggaccattttggaaatcacttactaaagtatcaactaattcttgagttgggttagttctaattaaattactgaatgaagttgcaaatttaggatcaattttgtaaacgtatttgaaagcttcggattcactaattgtatcagctagtggtaataaagagtttaacatttcactaataatacctgaaacacctgttgatggaagtgttgataacatcttggtaaatgagttaactttatttataattgcatcatgttcagactgaatttttaattctttttctccaactttagcattaaatttttcaactaattcttcgaatggaacattgtttgattctgctaatgcctttaatctttcttcaatggaagcttccttttcttgattaactttcttaaaatgagctgctaaagctgaattttcaaaatctgcttcagttggttgttcatgaatgaacataccatcttcatttattttatttgatgaaacgaattgagaataaacatcataaaatggttttgaagctttttttcctcttttagattttttcacagtttcgtcttgagtactggaagagttaaatctttgacttaaaataactttacatgatcttaccacagatgtgttggttttgactgtggatctgaatgccgcagatgcagatcttgaaagcatggttgtgattggttttaggaaatatttgagatataatatcaccctacaatagtatttattgtatacttaagccttaactttaacatttttcatgttgattttctatgaggtctctcgagaagtgaaatttcaaaaaaaaaattacaaaaattagtgaatggtgcacggtttccttttcctttttcggaaatcttatgatagcaagagctttaaaatattgcaatttagggattcattatatataagagatcaaagattaaaatttgttacaaaaaaagagtatttattacctataattaaaagaaaaatataaaaaatcaaacttcaacaacattaacatcatgaagctttttctcgatattctgtgaagatgtacctacagattcacttaaaatacgaataccattaacatcagttgaatcattatctgattctggatgaccatttagtttcttttgaattgcagtgagattaaattgtggatacatttgatcaacatacgtaccatcgacttctgccatttcatagaaatcggcacctaccatttctaattcttcattagctttaatttgtaaacctggaattttatcaacaataaaacaaatgatataagtagcaactaatgaccagaagaaacttgttgtccaacctgcaaattgataacccatttgtttccaatgatggaaaatccaaccaccttcaatttcagtcactccatcagtgccagctatataaggagaagcaaaaacacctaaacaaattgaacctaaaatcccaccaaacccgtgaataataaaagatctagtagtatcatcaacatgtgcaacttcattaaatctataagctaatctacaacaaataccaacaaaaacagatgtaatcaatgcccaataaggagagtaaaaaccacaagatggagtgatattaactaaacctgcaactgcaccttcacaagcagcgactaatgaccatttacgagtaaatgcataatcaacaccaacaaaagcaagcattgcggaagaagctgcaatttgtgtatttgccataatataaccagttctagtactaacagataataaagtacctgaattaaaacacaaccaagagaaccaaatcaatgaaacaccaataaatgtaataacggtattagcaggttcatactctgctttagttttcggatcaatccaatgtttacgaggaccaacgaaaaatgaataagctaatgaagcaccacctgaagcaatatgaactggtccaccacctgcaaaatccaatgcacctaattgataaaggaatccattaccacaccaagttgaataagcaagtggacaataaacgacggtacaccaaataagaccaactattattgaaggtaaaactcttgaacgttcagcaattgaaccaacaaaaatttgaactgttgcaattgggaaaaatgcagagaatgtaaaataaataattgaaggaattgtaccaccttcaatataaggaccaacaccaatattttgtaatgcaccccaagcaaaatttcccataaaacgagaatttgaaggtgaaacagcaagtgaataaccaaataaaaaccaaagaactgtaactgatgcagttactacataactttgaaataatatttgaataatatttttacgtttcaaagtaccaccataaaacataccaatggcaggtgttaaaatcataacaccaacagtacaaaacatgacataacccatatcagccggtgaaaaagttgattgatcttcactcattggtacatctctgtataataattgagccgatccaagacctgaatttgcgtaacccatgtttgatttgtgaaaaaaattaagatcttaaggaaattgaatagatatcaaataaagtttaaaaaagataacggggaatcaagttatctaaatacatatttgaaggaccctgagataattgagaacacccccaatcttttataagatcaatataaaataaagctaagttagagatatattagattgcattgataagagaaaaaaaaatcagccaatgcgataactccaatgaaaaaaaaaaactcgatggacatgtgttcctaaatgggtaaaaataagagtgataagatattttatcattattaatgtttaaaatgatggtatatttatattaattacagtatacataaagaatgaatgactatgtatttgtgggagttgtctgacgacgtatatcagcaaccgtttgagttaattcagggaattcctgtattagagaagcagcaagaattgattgaaaattttggaaggctaaaccacgaccatgtaaatgttgattaactttacgtacaacttcaacaaattcacgtgtataaacatccggattacgaccatcttgaacataatgtaataagtctgctggtattaatacatcagcattttcagattgaatttgctaatgttgcaagttgatttaatgttttatttatattatttgacaacccacgtttagcatctggcgttccctgaaaatcatgtacttgaacacctagatgtagcagtgtctctattagattatgtatttgttctgtagttgtagacatgtgttgtatgaagttgattggttgattagtatagtctttgatcgatctgtgtaatttgttattgtaagagtttcgccttaaagcagttaaattttttttttcagtaagtggaccgagttactctaatagtgtaaattagcgggtatattatgataatgatagtgatggatacactacactgcggagtcactctagaatagattagaatgaattagattagatcagaagagaggagataacttaaagataagactgatcaacgttacaacgttcctttctttctttaacattctttcttaaacattctttctttctaatatagtaatagaagggtgtataactcaacatgatattacgtaattctgaaaatatatattcacgtgactctgcgcaaattttaatacataataattgcctaatatggacaacagtctaatcccgtaaattattatctaagcattaaaattttgtaatgactgttacaatactactatagctgaccagtggattagtaaagattaataatatgatcttcatgtatataatgtgttcatgtccttattatgatgaaattatttaacagttagcaaaaatcaacgatgttacaaattgatgaagaacttatagagcattggaataatacattagccgatgcaaaggcagaagagattatattatgggcatatcaaacattcccaggattaattcaaacaacagcatttggattaacaggtttatgtattatttcaatattaaatcaacttaataaagatgtaccattagtatttattgatacattatatcatttcccacaaacatatgatttagttaaagaagttgaagataaatataatattgatgtaattgtttataaacctaaagatgttgaaactgagagtgaatttgttaaattatatggtgattcattatgggaaactgatcagttaaaatatgattatttagttaaagttgaaccattaaagagaatttataaagaattaaatgttaaagcagttttcactggtagaaggtcaactcaaggtgattcaaggtctaatttaccgattattgaaattgataaagtatcaaatgttattaaaattaatccattatcaagttggacatttgatgatgttaaaaaatatattgatgaaaataatattccacgtaattcattacttgatcttggatataaatctgttggtgattggcattcaacagtaccagttgcagatggagaggatgagagaagtggacgttggaagggacaagttaaaagtgaatgtggtatccatgtattgcatgaatacgatcattttgaagagaaatgtgatgaaaatgaaaatgaaaattccgagacaaaataaaggaatatagtgaatatagtgaatgaaatttccgatgtacgcttacgtaaaggaagttatttataaaaaaatttataataatatagaaagactattattataaacaattcgtactgttaataatattaatattaataataacattaataatttgatcatttgccctcgtgagatcattatataattagttctttgagttaatctattaattatatattacaagacaaagaatggcaggcattgcagatatcagaaagaagctggtcattgttggggatggtgcttgtgggaagacttgtttacttatagttttctcaaagggggcattccctgaactatacgttccaacagttttcgaaaattatgtcgcagatgttgaagttgatggtagaagagttgaattagctctttgggatactgcaggtcaagaagattatgatagattaagacctttatcatatcctgattcaaatgttatcttaatttgtttctcagttgattctcctgatacacttgataatgttcaagaaaaatggatttctgaagttttacatttttgtcaaggtgttccaattattttagttggttgtaaaattgatttaagaaatgatcaagcaactatttcaagattagctgaattaggtcaacaacctgtttcaacttctgaaggtcaagaagttgctgataaaattagagctttaacttatatggaatgttctgcaaaacataatcaaggtgttagagaagtctttgaagctgcaactcgtgctgctttagcaacaaaggaaaaggaaagtaaaaagaagaaatgtacaattctttgattctttctataatctttactgtataatctaataatatctcatcaattatcaattatcaattattaattattaattattaattatctattctattacccttatatatcattataataaataatatataaatttatataatataactactacttcatctataatattaaacttatagttattaactataatatacgcttagattctcgaaatatatggatacataatcaaattttaatttaacaactttttaaatcaaatttttactgcttgcatcaatctatttccccccttctcttcaaataacaatgccaaatactattgacgacgctccaactcctcaaaatacccctgcatcagctgcaggctcttatatgccatctcataatgcaccgacttcactttcaactattgatgaaaaaaatgaattattacaatcattattatcaaataatcctcaattattacaatcaattcaagataaattaggtactttaattggtaaagattcaggttatttccattcattatcaaaatcaaccaaagaacatatttatgctttaaaaactttacaattatcacaatttaaaattgaagcagaatttcaatctgaattacttgaacttgaaaaaaaattccaattaaaatatcaaccaatatataaaaaaagattagatatcattaaaggtgttgaaaaattagattcaaaagatattgaagaaggtaaaaatcttattgatgaagaaggaattgatgaggaagatgaagaaggtgaaggagaagaagaagaaaaaccagaagataatgctgaagaaaatgatcaacctggtgttccatcattttggttaactgctatgcaaaatcttcctcctattgctgatatgattacagaaagagatattgaagtattggaatcattagttgatattagaatggaatatatggacattccaggttttaaattaattttccaatttgaagaaaatgaatttttcacaaataaagaaataactaaaacatattattatcaaaaacaattaggttacacaggtgaatttatttatgatcatgcagaaggtgataaaattaactggaaaagtaattcaaaaaatgtaactgttgaaattgaattaagaaaacaaagaaataaacatacaaaacaagttagaacaattgaaaagacaagtccaattatttcatttttcaattttttcacacctccttcaatgcctgaaattgatggtgatgaagatgaagaatttcaagatatagatgaagaattagaggctgaattacaaaatgattattcaattggtgaattaattaaagaaaaattaattccaagagctgttgattggtttactggtcatgcattacaatatgaacctgaattccaacctgaagatggtgaatatgatgatgaagatggagatgattatgaagaaggtgatgaagatgatgaggatgatgatgaagatgatgatgaagatgatgaaggtgatggaaattcagctgaaaagccagaatgtaaacaacaataaattaattaaccttatataatataattattgttattataattattattattataaaatcttatatagttaaatcataatcgaaaaatgagtatatactcttaaccttacatgcattatcatcattaaatgaaataacgctacatttagtaattgtatcgttgattgtatcaaaaaaaacacgtaacttcttctcttttgatatccaactagataatttaactgatgattttgatttgattataatatttatacttgttttacccttctttaagttattctcccatatgagaatattatcagcatgtgtcaccataccgttatcacattttaaaatttcagtatcatttggaacatccatctctatattaaattgattttatatctatattactatttatcaataatgtaatctcaaatttatcatttgataattgtttatatttaccatcgatatgtacaggtaaatttctataacttgaattggatttataatttaaaactgattcaatatcgttttctgaaacatacagtattttcaatgtatctctagttttggatctgattgtacaatttgaagataatctcaataattctaaagtattagtatcttgaggtatttggaattcaaaatcaattgagttattaggtttgcttagtaataataattcaccaacaatatctacttgtgaataatcattatgtttcttcaatttgacaaattcattaattcgtaattcatgattttcagtgattgtttcaggtttgttgattatattcaaatgatatgattccttagttatattaaagtcatttgagattttatcctcctcggagacatctttgacgggaaataattctaaaagcatatcaattgactctgtaccaatgtttcgtacataaccttgatcaattaattggtttaaaaggccgtatattaataagaaattattctttatatcaacgtctttcaaattatattcttccttgccagtaacattagtgttcaacaaattatttatcaatttagtgagattcaataaaaattgtaaaataacacttgaatcagcattatgtctacttataacaacataatagagatcaccttctctgatatgtataaatgttgttgatccaatggttaaaaatggatttttgaggaaacgttcatttttgatgattttatcataaaatatgctacttatttcattcttaacatcctccctgtatattttagatattaaaacatccccggtagagtttagtattagtactgctgatatcattgcttatagacaacagcatcgtatggaagttatcggattaatatattatggagctttaatttctcaattataaaatttctaattttcggtgattcactgtgaaccatttaatcatgacattattttcttttcagtcttttaggaataaacgtacaactatagaacactattatggcaagaggtaatcaaagagatttagctagacaaaagaatttaaagaaacaacaagagaaggctaaaagtgaaaagaaaggagattatcataagagaatgcaaaatgatggtgatatattgagagagaaacaaagacttgcagatgaaagaaaagcagctgaagcagctgcaaaattaaagaaataaatatagacttatagacatatactttatatactatatggatatatacatgtatagacactcccgcatattttatagattacacatgtgtatattaatacagtatctaaattatattaattacaagagaaaacccgatatattttttatactatattaattataaaccaattgttagactatttaactaagcatcaactttaagagcatcaggattttcattattttgatgttgtaaagcttcagcagttttttcaacttcatattggaaatccaaataagattttggtaaatggtgtaatctcataaaaccatcttcaccaccagacacaaaagaatgaccatcgggatgagttgataaacaatttataggaccaaaatgtcccttaattctaccaatttgatcttcaaatattttatggaaaattttacaatcgaatctaccttcaccaccggcagttgttgtaacatttttagcatcttgaccaccacctaacaggacaaaatctttcacaggtgtaatacaagctgaattaacaggtgcatcagagagatattctttcaataattcaaaagtatcaatatcatatagtcttgaagtttgatctttagatgaagcaacaaaataagttttatcagatgatgtttgaatatcagtaacagtttctttgaaagccttaactctattaagttcttcaccagttgttgcatcatatttagtaatactaccatcagcatgaccagttataatatatttaccaccataagaccaagctgcaacggttggttttatagatgcatcacctttatttaaaatttctaatacaggttcatcagattgttttgaaagatcagatgtattaagttggaaaattttaacggtacctacttgacccatagcttgatctgttaagaagaataaaaatttattatcaggagataattcacatctcttagcaggtgaattaaaattccatgtatataaaattttaccatttgcagcattccataatatacctgaaaaatcagcacttgcagtaactacaaattctgtttccaaacttacatcaaccgaccaaacagtacctttatgaccatcataggtacctaatctttcaccatttgatgaataccaaacacaaacgtgttgatcctttgcaactgaaaagattaaatcaccttctctattatatttaacttgtgtaagaggacgttcatgacctgttaaaagaataggtctcattgacttattagaggacatgttgtttgagttattaaggtggtatttataataaaattattcaccactatgttaaaatcaatcaatggtacacactttttcatgtagattattcatgaagaaaattatttcaataatatactataagtgaaaaaaaatttattattattatggtgtacgggaagaaaaataagttggttgggtcgatgggacggtgagttgccctgttttcaattttcataatttttagtgacattgccattattgttaaggctctggtaggtgtagaactgtattttatattgctcaattgacgtgtattaagcatttctttggttggaaatgacagaaaaactacctggtaactactgggattctcaaaataatgatgaaatgagttttctaggttttaatccattggcagatgcaaatattcatatagatgatacaaataatagcaataataataataataataacaataacaatagaaatttatatgatcaaaatcaacagaagcaattgcaaatgcaacaacttcaggctcaacaacaacaacaacaacaacaacaacaagcctacaattcacgtaaaagttctcatgcttcgcaacattcacaaacacagtctcaagttggaacacctaatatgcttaatgcaaataataacaattataataacaatactgctaattttcaacaacaacaacaacaagttcctcaacaagcacctcaacaatcttcaaatggtatgcatatgaatcatcagagtacagagaaatttttagatttagtatctcagtatatggaaaaaatgaagaaaccatttgttagatatccaactgttcaaggtacaaaaattaaccttttcatcctttattatatggttacatgtgcaggtggattcataaaagcatttcaagaacaaaaaattataatgattgcaaatcaattaggaataccttcaaataaccagaaagttttcaatgaatttttacaatgttattatactaatttattaccatttgaacaatatgctagaactgctgatcaaatgaaagattctcagagaagagctgctcaacaacaacaagcaccatctcaatcatcaaatcaatctcaatcctcaacctcaacctcaacctcaaccaagaaataattctcaaacagaagctcaattacaagctcaaactcaggcaatttctcaagcacaagctcaagctaaaattcaggcacaaatacaggcacgtgctcaagctcaagttcaggcacaagctcaggcacaagctcaggcacaagcacatgcacaacagcaacagcaacaacagcagcaacaattagatccaagatctcaagccttttctagagaacaaattcaagcacagcaattacaagtgcaaatcaaaatgcaagaggctcagaaaaaagctttaaaacaacgtcaagagcagcaacaacagcaacaacaacagttacaacaattacaaatgcaaatgcaaaaaaaggaacaagctgataatattcctaatccactttcaacaataaagcaagaaactgatattaacaaaccaaattttattgttgatccatcaaaagatcttttgaaaaataacttgaaggctgctttcaatgaacctttacaagatcaatcaatgcctgatgttatcaaaaattatgttccgtatacagttatacaagacaaacctgcgggtatagatatcatgaatatagaaagattgggagaacaattagatgatatgaaacccgtttttctctattttccggaattaggtaaagtgaatataatggcattggctttatctttatcctctggtatagttgcagaaataaatgtggcattgaatgttttattaattataagttctgatcctaatgttaaaatattatttgaaacttgtccaatattacttgacagtttagctaaattaggtaaaacaattcttgaaaaattgatttcaggggattgtcattttgatcaaaataaaaactatgttttaactaaacaacaaattgaagaaaatgcttgtgttagtaaaatagataaaatctttgaaaaatattccaaaaaatttggtggttcagactatgaaattcaagttgattcatttactacagaggaaatttcttcacctaataatgaaaaagtgaatataaatcttgaacttaatgattataaagacaataccaagttaaagaatttacatattaatgaaagtcctgatttgcacaacttcttcaaattttcccctgagtacaaaatacctaattatttggatattttacatgaatgtcgtcgccaagctgatgatattaatataaatgtttacgagaaaagttatttgaataaacacgttgttttggttgaagaattaagtacaataactttaatatttagaaacttttcattctccggtcaaaataatttgtctatggcaagaaatagatattatctggatttcagttatgcattaattgattcactcatctcaaagaaggatatctttctgtttgaaaggaaaagattagccttgatgaaagatacactaatgatattctccaatataatacatgctgttgatgttgaagatgatatggaaatgtggttaatatttagtcttgcttattcatttaacggtagtggtgatgctgcagcgaaagagaagttaaacattacaacatccaaatctgatctttttgtgaacaggtatcacacccatgcaattgatgtactatccaaaataatttctagctcttcattgaacaggcaacatttgaataacattatcattggtaagacagatgatgagttattgaagataattaaattgaattttggtgataacttttcccatgatggaaggttattcaaagagattttctcgatgtttatttccatactaccagttacatcaatgtatcaaggtgttgagccatttaacgtgatgtatcactcatgtatagaggcattaacaagttgtttgcttttgacagaaattttagaggacccttcaagatttacgaaaaatattgcatttgagttagttgtttcagaagacagaatcgtccctatattacaacatttagcatttatatatgctgccatatacgccaatattagggatggatctaaggaaagatactcgctgttttcaatgcgttgcgtggaacttgccaataaattaatcaattgctcaattgaccattcgttgaacaatgaggataagaaggatttagagatatctatgttgaaaggtattactagacttttcggcaatccagacaatgagattggcttattaatgacactaaatatacctacagaaattttggaacatgttatagaaaccatgaacattgaaaatagattgaatcaactttaatctattaaataaaatttataattgtacaataccctaaattactatatagaaaaaaaacctattctttacaacttttattaatgaaagtaaaggctttacgtgcattctcctttcctataatttcactcatatcatccactgacatttgacaaaaatcgtatagtgaattgatcttattgataatcaatatactatttgcatcagtgataccaggtatcagtttcaataatttgattgcatcttcgtttgtatctctaccatctttaataccattagtcccagcagtcaatgcaaattcaacatcaggatctttttgattggctttaatctctttaaatattttcgcagtttcaaatggtgaactactccagattattgaaagtttaggaaatgatttcatcaatgctgcaagtcttaattgtaattgttccaaatcattactcttaacatatctattagaattacttgttaaaaaacctgttgtaaaaggttcaaatgaaaaggatttaccctcatcaaattcaattaataaaactggttttgaataccatttaaacatactctcacattgtttattcaatctaccattttctaaagattcaattaaatcacgtactgcttttctttcaacacaaatttcatctgataaaatgtaatcaccaactgttaacattgcaggtataacttctaatcctgctaagtgacaaacaaatggtaattgtgaattgaaatctctcatatcaacaatgattctatttgtttccgtagcaataagtccaccacctgcaattcttgttttcgaattcaaatgtctgaaactttcattgaatttgctttgttcatcatcttcggtactgaaaaacttaggcatgtttgccttttcacggattaaactagtaaatgaatctttttcatgtttaattgaatttaaataaatctgttcctcaacagattctccataatacatgaaaaaacatttggcagggtgtaatgatgcctgatataattcaatcattctaacaaatacaagacttggttcataacaaataatataagatggcataagttcttctaaattgatgctatcaaatgttgaaataatcacttcattgtttctatcaatacaatcgtacttgatatcattggttaaactattgtaatattcatattgaatttcaggagtttgaattcgttcattcgtttgatttatttcagcttctaaattattaagttcataatctgaatcatcactttgactggattctatatcaattatttcattctcattaataatttcgtcgttttcttcagatcccatattcataagtctattgtgtttggacatcacgctaccacctctatttcttctacgattagaatctctaaatttatttcttgtaaaagttttagaaatgacaacatcgtcctcttttgttgcatcttccctctgtgattttacatttttcaattcagtattcattttccttattaataaagatgattcttttttccagttttgatatttcagttcctttttcatcatcttacggaagctatatgattttgaattaccttcatttaccactttatggtttgataggaccctttctatttgatgacaaattgttcttgatgcacatgcaattaaaatagggccactctcagaatcatttttagcagttttttcttcatttatttcttctaatattagcatcagttgctcccatttcggtggctcttcaagtaataaatcatcaattggtgaaattgaaggtttattcatatttttaaattttctgtaaacacgatctttactacaagcaattgttgctgaagcttctggaatcattaaccataatgactctttatttgacattgacattgtatgttccgtgacaaaactatttatattttgataaaatgaaacagaatcgagtctaaataaatcaatcaaaaatgtcttcaaaattgttatttcattaacaatctttttagtggtaacagagattctatgccatacgggatttaaagcacccataattgattgtacaaaattagcatctaatgcattttcaatagaccaatattcagaggctatatctggattatttctcttcaattccccaatcagtagctcaatactagccataagggagttttggattttgaccatataatctgtcattttaattctcacttctgtaaccttattgatgggcgtggagaaatctgatttaatggtcttcttcattttcctcttaattgattctgtaactgcaatatggaatcttggccataaaaatgatttgtcaagcttaaaatattttagctttgtttgtaatggttgaaaacctttgttacatttctcaggatcttcagaaaaagccttaataaatccccatttgttactttttcggtataaattaacaacaaatctatccattgaatattgtgagatattttcagcgtgtaatatcaccaatcctgtaatcgtattagcttcaataacatcacccaaaatatctgttactaagacacgattacttaaagaaattataccaccatttgaatatattttccgacgtttatcaactgttccagcatctcccaatagggaaacaaaattgtgaccattcctctcagttaaatctttattattatcaataatggaatcagtttcatcggagacattactccgtctccaagataactccataagggtttcctccaagaagttattttcttcctctgaagcattaatcaacataatcaaagatttcttatctcgtatagttgcttgtacctaacacatgtaaaagatttgccacaatctgattcaatccgagaccttttcctagtataaccaatccatcatccttgactaaatccgtgactatatgttcctgaaatctaagataaagagatagtgatatatcaattgagttttcctcctcattaaccatatccattactaattattcccgtctattctcactagacaaacacacaatcaagttaaaacaaaacgccaaattacaatccctgggcctctgagaccggagtcaaaaaaattcccccaaccacagaaactgcaggaatttttcaaagtgtgagtctttgtaccattaaattacacttctcttaaatttgaagattgcacacatgtctcctatctgtaattatttccttttagctatcattcttggttatatatcaatcggaaaacactgaattatgagtgtaaagataacagagaagattgcttcacttggtgaagatgaacccttcttttcattggagtttttccctcctaaaactgaaagcggtatgagaaacttatatgccagattaggcagaatgtccctattgggtccattatttgttacagttacttggggtgctggtggtactacctctgagaaaactactgatttagcggttacttgtcaaaaggatcttggtttaactacctgtttacatcttacatgtacaaatacagctgtatcagttattgatgatgcattaaagaaagcaaaagaatctggtattaaaaatattttagcattaagaggtgatccagctagagattcaagtgcatctcatggtgctggcgattttaaatatgcagtagatttagttcgttatattaggaaagaatatggtgattatttctgtattggtgtagctggttatccagaaggtcatgcagatggttcatttgaggaactgcaacaaaatattagaaaagatttaccatacttagttgaaaagataactgctggtgcagatttcattattacacaattattttttgaagttgaaaagtttatagaatatgattccttggttagatcacaggctgaactcaaagatattccaataattccaggtttattaccaataaatggttataatatttttcaaagagcatctaaattatcacatgcttcaattccaaaagcaatattggataaattccctgatgaaattcaaaatgatgatgatgcagttaaggatattggtgttgatgttttagttgaaatgattgataaaatctatgagagaactgataatagagttaaaggtattcatttttacactttgaatttggaaaaatcaattgctcaaattgttaataaatctaaatacttatccaaagttgttgctaaaaaagaactggaactgtcaaacgatgaagcagattcatcagatgatgaaattgatgatgcagttactgatgctaaaagagctgcatatgctagtagatttaatacaacaaataaggttattagtgatctcaaatctgaaaatggtgtacataatgtcaaaatgaatcattcatcttcttcacaattacaaaaactgatttcaataagttcaggtcaaggtgttttaggtaaagatgcaacttgggatgatttccctaatggtagattcggtgattcaagatctccagcttatggtgaaattgatggttatggaccttccttaaaagtcacttcaaatcaagcttatgaactttggggttatccaactacaaaaaaagatatctctaaattgtttatcaattatttattgaagaaattaaattgtttaccttggtcagaattgagtttaagtccggaaactgccttaattcaagaagaattaatcaatttaaatgaaaaatcatatttcactgttgcttctcaacctgctgtcaactgtacatcgagtaaggataaaattttaggttggggtccatcaaatggtttcatttatcaaaaagcattcgttgaaatgttcgtttcaaaggatgattgggatagtaaattattgccaaaattgaatgctgctggtaagtctgttagttattattattcagactcaagtaatcatttcaatactaacttaccacacaatgcttcaaattgtgtcacttggggtgtatttccaaatagagaaattttacaaaccacaattattgaagaagaatctttcaaggcatggacagaagaagcattcgaaatttggaaagaatggaaaatgttatataagaaagacagtgactcagctaaattaattgatagtattttaaacagttactatttagttactgttattcaccatgagtatccaaatgaatctgcattatgggatttattattggaggattaattggaaaagccctgtttttagtagtattatatttggtatagagtataaataaattgtttataatgtattcatgatgatgagtaaatttacgacgttgttatgtttgaagttagatctcgtatcctatttcatccttcaattctttcaatttccttttatacagattgtagttcaactttattattcttcctcctagaaaagttatattttcgttcttcaaatgcaatgtattaatgctaactttggttccaccatgaactaataatttacttcccaactctattctaaatatccctttcgtgtttggacctcttaagaactgtaatggttcctcttcatatgcataacatagattaccaaaacaatcctgtaatatcaatctgtatattacattgttgtttatatgaacattttcagtttcaggaggctcgttatgatcatcattgatatccacagaagtgatgataggtcgatgtcgtgttgcacgattacctttataatgatcctgaaagccttcatttgcgttaatcatatctgttatagtatcaattaaagacattgttgatactgtggtatcacgtacatcaactatctgaaacaatgtattatcatttagtgttgttaagttttcggtttcagctagacaatgtgtataaggtattaaagcacctttaaaagtttcttgaataggatgaaaaattaactgagttctatctttataaatatcttgtactagtacactagacattgacaatcaagttacttggtacagaagaagaaattaagatcaaaaaaaaattcagttgatcttactttcatgatgcatgcataaagttaactcttaaagcataaacacaatcaaaaaaatttggacgagaccggagtcgaaccgatgacctttcgcttgcaaggcgaacgcgctaccaactacgccacacgcccaaaaggtaactgatccctagcaggatcgaactgctgatcttggcgttattagcaccacgccttaaccaactgggccaagggatctgttattgaaaaacaagtcccacgcttttacctgcccaagctaaaataaggtcacgtgatttgaaaaaattatgattgaaaggttatttttacaaaaaatcaaatttacttttcaattaaaaataattaatttttttaacttggtttttgtaaaacaaaaatacattaaatcaataaatttacagttattattaagtaattattcagttttttatgaaaaacattaaaaagaagtaaatattctacaggatctaccaaaatttataccaagctttatgcaactcatttctaagctttttatagtattcaaattcattccaacatgatctatctccattattacaaccatctaaatttgccaagaagtcacgatcatttttattatagaataaagttttatcatctttttgatcccaacaattaccctttgttaaagaattgatcgcctttattggaacaaatgccattgattctcttatccaaggttgatgggaatagagaacttcaagacaacttgcttctcttctttcccaaaccatatgcatttgttcatacagcacaggatcccaccatgcatccaaaagtaattcagaccattctgattttcttataaggaatgaatttaaattaaacccattacaatcttgtgttatgatcatattaatcggagatgttgttgtatcaacatatggtgcctcagcagtaatatcttgaggattaaaataatttattgttctgtaagcttttttgtcaatatttcttaataaataactagttaaatcaatttctggttccattataaatgtattttgatctaaccaccaaaaccactcagcatcaggatattcacgcattgtttgtcttaaaatatcaactctctcccaaccttctctccattcatgactatatcttcttttaagggtagtatcttttaaagttaaagcataaccgtgtctctctgcgtaatcttttttatttgcaatactagttctttccaatgaccattcttcaggtgttttccaacgttcaacaccaccaccattattaactgctaacaccataacaatttttggactacttgatctagtgaatcgataaccattgaaaatcaaccatataaaaaatagtaatgataatgtagccagtacaattttaccaatataatggttggtttttagtcttagtaactgatttggtattagtttgtgttttaatgtgaatgtttttttatcttttggacggaaatgatcatcgtcatctatatttttttccagatttgagctagcttctagtaaatcaatgattgattgagaagtagcattctttctctccatgattgacggtatagttgatgcttaacaatatagatcaataaacaccttttagcaaataacatggatcaatctttaagagtggttgacaaaaaacctatctcgcactataaattaattgaacaccttctggtaactatatttcaagctgtttacattgattttaatttatataaaggtaagaatgtatgaagatttataaaagtagtaaagcatatatacattagtagatagtaaattatatttaaagtgaattcacttaaactttaaattcagaacggaattgtgcaacattcattccaggacgaactttatcaataaggtcccttctatccattgctaagaaagctctttttaaagtttcaatcaaattacttgattgttcagtatcagaaaccagcattgtatcaccatttggagattcaatttcatgcatactcaaaccagtgagtaattgatcaacagcatctttatacattcccatattgataaaggaaactcctaaattataacgagcacgaacaaaattcggatttaattgtaatgcctttgaataagattcaatagcttgttctggtctattagaattagcatatgatgcacctaatctattccatgataatgcatcatttggattacatctgatagcagcttggaaacaatctaaagttttatcataatcttccattgaataaaataaaacacctaaacctgtttgaacatcagcatcaacatttacaccagatggtgataattgtgcagcttttaaaaataaatttgtaattcttttatttaatgaatatctatcatcagatatatcatttggattttcgagtctagctctagaaacaatatctggatatttagtttcaatccaattttcaaaagttttaaaagctgcattatcataaccttcattaacataagaaattgctaaatccattaatgcagttaaatttttatcatctattaaaagacaattctctaatgctgttattccactaagttctttttcattctgaatttgtacttgaccaagtttaagccatgcatctacatgttttggatcactttgaactgctgcttcaaatgctaatgcagcttcacttaattttgcaccaccttccattaatttacatccaatttcatatgcattaggattgtttaaaaattcatttttttcttcaaattgatattcatcatgatatttatcatggaaactgggcattgaatgtggcattgaaaacttttcgtcattaggatataaaacttcaggaatttcatttatttcggatgattgttcaaattctttaaactgatcatcccattccgtttgagatagagtattagcatccatagattgtgtattagactgtgattgttgttgtgattgaggattaaattgatgattattcatcatcatattatttctgattgcatacattgatgaacctctcatcattggtcccatattacccatttgtgacataggagaataactttgttgtgatgtattattgatattattactaacaattggagctgttgctgttgctgttgtagtattaaactcttgtgaccaattagcggcatgtggcgcagtagacaaattgttgttgagccccatttgcggctgaagtgaaatattattaagttctctgtgaacaggagcaaaatcgaatgaacccataggaggagcagatagatgatcacctttgaatgaatctagcatagccatattatgtgatgacatttgttgttgagaatgaataccatgtaggttatgtgcattttgaccatttgatgcagcatttctcagaccgctttgtagagaggtatccacatctggtctctttgctaactgtgcaagaggattagctgaagaggcacaatcagaacctccagctagaaaagacatgtgtgataaatatgacagatatatacaatagatacaatatatttatccagttataaaacaatgtaatggactgaataaataattaagtgtggtgaaagtctatattaaatttcatggagataatcagaagaaaaaagccggttcaccctcgtccagtaatagaaaatttcttttagcggggtataccagttggtttgaaaccattgattattattaagctacaattccatctctttcactggtttatatctcttccttacgctggtttatttgctctgcaaaatcaagaatgtcctcaaagattccatccactgctgcacaatcagtttctcaaaagttattcaacaaggaaaatttgaaatatgtgtttacatcacatttttggggacctgtctcaaattttggtatacccgttgctgcaatgattgatttgcgtaacaaaccagctgatacaatctcaggtccaatgacaggtgcattgattgtttattcagctgttttcatgaaatattctctggcagttattccaaaaaattatcttcttttcggttgtcacatcgttaatgaagtcgctcaattaggacaagcttttagatacattaattacaattatcttgaagaaaataacagcaagcaagaatcaaaataaattctccacacttttctagttctaatgtgtatatactaaattctataaatatattttatcaaatgaaattcattgctcaatgattatcaaaaaaaaaaaaaaattagtcaaagagacctttgattaacaccctttgtgttggtcctaagtactcatcatcattttcagttttattttcatttatgttttccttttcagcttcattctccctttcttctgttaccttattggaatcagatttatctgatacatggtttttctcaactactttagtttgatggaacttactattgagccaaaatatttgttcaaaatcttctctattctcatctattatcatcacttaataatttccgtcttttagccttgctatgtgtatcattttcttcctgataattatcattaacattattatcatcgtaaaattcagcttcttctgcaacaaataatggttcattgatgccatcatcacgctcaaatctgttcatatttaaattattgtcaccattactattattatcattaattgtagcagttacacctctactcaaactaacatccctttcactatcaatcaatcttctagtaaatcgttgattcatagcatttatttgattattggtaatattgttgatactactattttttgtatgaagagtcaacttactagactcaccatccgttatttctgtcaatgtaactgaacaacaatcattatcctgtaattcaccattatcaataaaatatcttctctcaaagacaataggatatccaggtttcgaaaatattatatcacaaatattctcaccattatcaaagtgcatactcttatctccatatttggataaacttctataatttttacgattatttgtatcatcatcattttcatcattctctaagaattcagataaattaccactaattatctgaataaaagttttaaaattctttaatctaaatgaagcttggatctttttactttttttcaatttatctttttcgttagtatcatcaccatcattataatctttgaaattattataaactatttgatctaatctcatttttatgtctaatgtcattggtctgtttactaaattagtagatctaatagtatgttgctgtcgattatatcctttaaaagtaattaatccaacagttggctcaacttcaatttgaaaatcttcaagctgcacaggaaaagtctgtaaaaatgatttcaatataactgaatcaacggcaattctatgaaccctttcatcattaaagtcatcatcatcgaaatcatcatcaaaatcatcaccatcattatcatccatctccccacctccattatccagtctcaacttaagctgcttttcatcacttattttttgatctcctaatgttttcaaataagtatagtgaatctcactatcaaatccattgaaacttggtcgataacttattgtatatttcttcttcataccggatttagtatcaaattcaacaaataatctatttgagtaaatcatatgcgttgtttcaccacttgccaataaaaatatcttccaacttattgcatcctctccacaatccttaaacaacacattcatatctcgactatttaccacaaatgtataacttctagcataattatagttatccattccactaccagacgcgttattcctatctctaacaacatcttctatttcaccttcaatggtaaatttcttgaagaatgttgtcttgaatgaagtatttaaaatagctgtcttagttttattcatcgttacaaacagtaattctgaaaaacatttccttccatattgatcaacacctgaatcttcaccttgtctaatgacaattttaaaactatcggatattgtataaaatgaatttatcgcctttgtccacagagcacgtgcatctcgtgttttgagctctatctctgcacgaaatggcattatttacaaagaaaagaagaagatcaagagggccaacatgaaaatgcaacacgtcaaattttgctcagctcaggatcttgtttaggaaactttattattattattattattattaatatgcgaggtttgttttcaattttgaattttgtttgttcaaaccatcttttaagctgagcttataatcccatatactacacgttaaattaacaatttcaagccacaataatgaaagtggaagagttggttattgatggattcaagtcttattctgtgagaactgtgattactgattgggatccacaatttaatgcaatcacaggtttaaatggttcaggtaaatcaaatattttagatgcaatttgtttcgttttaggtattacaagtacaacaggcattacgtgcctcaaatttacaagatttgatttataaaaaaggtacatccggtgttacaaaggcatctgtgacaattacttttgataattcagatcctgatacctctccagttgcttataaaaatgatagaaaaattagtataactcgtaaagttgcagttgatcaaccaaattctgcaagtacaaaatatttgattaatggtagaaaggcaactcaaaaggaagttgctaatttattacaatctgttcaacttaatattaatgatccaaattttctaattatgcaaggtcaaattactaaaatgttaaatatgaaacctaagcaaattttgagtctgattgaagaagcagccggtaccaaaatcgtatgaggcccaaagagattcatctgaaaaaattatgagaaagaaagatgctaaattagaagctattaaagaaacaagagatttacaagttaaaccaaaattggatgaattagcaagacaaacagaagttgttatagaatataaaaataaagttaatgaaaaagacaaaaacgcacaaatgctttactgctatttataccaagcagggctagatactataatggagactaaagaaccattacgagagagtaccgagaagcttgagaaatgtaaggagtcaatcgaaaagtataaaagccaaattgagagattgacaagctgaaattaatgagataaaggaaaaaaataaatcaactagtgactctgctaaactaaaagagttagaagcacaagagcaagacttatctaattcaataacaagattaaaaactgcgatgaactctaagattgagaatataaaagaaataaaagactccataaagttaaaagaggcggaaattcaaagaaatgaacattcctttaataacaaaaaggataaattttcagaacttcaaaataatttcctaaaggaagaaagtaatttgagaaatttcaaagaggtattacaaaggaaggaagatttattatctactctatctaccggtatttcatctaaaggatctagctgactcaggttatacatctcaattgagagaggctaataaaaaattatcagaaacgaaaacattaattgaacaagataaaattaatattaggcatttagaatcacaatgtgatactaggaaattagaagcttgtaaaaaggaaattttaaactatgaaaatgaaatttccaaaagaaaacaaacagttgagagtataaagaatcaattacgtgtgaatggttttgatcaaactgaatatgaaaaattaaaacaagaagagaaaaccttaatagaacaactaaattccaaaaatcgatatttacaagaattcacaagaagagattcaagatttgactttacatatagtgatccagttcctaatttcaatcatagctcggttaaaggtttatgtggtgaattatttgatttacctgataaaaataaaacttcatcaacagctttagaagtttgtgccgggtttaaattattcaatgtcgttgtcgatactgaaaaaacaggttcgttattattacaaaggggtagattaagtaaaagagttacttttgttccattgaatagaatttcatctaaggttgttagacctgaaattttgaatgaagctaaaagaattgcaccgaataaagttgaacttgcattgaatttggttgaatatgataatgatgttggaaaagcaattgaatatgtttttggtaataaacttatctgtaatgacccagaaactgcaaagaaagttactttcaatgataagattagaacaggttcaattaccttagatggtgataattatgaccctgaaggtagattatctggtggttcaagaagaacttcaaattcattaattaatcaattctcaagatataaagaattgaaacatgatgttgatacaattagaaatagattaaatgaaatatctaaaattttaagaaatatgaatcaagcagcatctaaaaataatgatatccaagaacaactagtaggtgaagaatataatataggtttattagagagaaaacttgttgaaagtaatgctgctatttatattcaaaattttgagaaaaatatggaaaaaatcaaagaattaaaacaattaattgaattaaatgaaaataatgtgaataacattcagcatgagattagtgagattaataaagatataaatgaatttaacagtgatggttctaagaaagttagagaattaaaggaagaaattagtagaatgacagcagaattaggtgcaaaggagaaaaatttaacaaagaaaagatcacttttcaatgaagaaaaagttagaaatgaagatttaatgagtgatattgagacatggaaggcagatatagcgaaattaaatgaagatttacccgaaattgaaaatttagtaaaggaagatgaattactcattaataaatatcaaatagaattagaatcaatagttgaacaaattgaaatagagagagaaacagcctaatggttttattcaagaattaaatcaattatctgaacatttagaacatacaagaaaattactttctgaatcaaatagtaaacatgaaaaatatcttgaagaatcgaattattataaaagttgtgaaagacaggcagtaaatgatatgaaggaagccaaaaaattatttagttggattgaaaatgatgttcaaagaaagaatatacttgaacaatatccaaatattgatccagaacaatgtcaacaaaaaatcaatgaatgtgaacaaaaaattatggaacttagaagtaaaggtgcagatgttaatattattcaacaagctgatatgcttaaaacccatgatgcatcattagagaaaaagattaaaaagattgaaaaggataaaatgaaaattcaagcaacaattacaaaattagatcaatatttgaaaactgaattaaataaaacatttgaaattgtttcaaaagaatttggtgaaacttttgaacttttattaccaggtgcatatgcaaaattaattaaaaccgatactaatggtgatataacaaaaggtttagaagttaaagttagattaggtaatgtttggaaagaatcattagttgaactttcaggtggtcaaagatcactagttgcattagcattaattatgtcattacttcaatttagacctgcaccaatgtatattttagatgaagttgatgcagcattagatttgtcacatacacagagtattggacatttaattaagactaaatttaagggatcacaatttattgttgtttcattaaaggaaggtatgtttaccaatgctaatagattattcaaagttacttttcaagaaaatacttcagttgttcacatcaaattctaactaattagtacaatttttttgaacattttttgaattttttaattcttgtatattcaatagatttaaatttagattttttctttattgaatttgtatttattagatttgaacaatctattatatcatgatttttattttgttcataattttgaacaaattgataaatttcattatcaatttcataagttaatggatttgagatgatgtattttgttttacgttcaattaaattttccttattatttatactaattacttcattttttgaaagttttaattctttgaaaattaaatattcatattcttcataggataatgttttaatatcattatttttattaaaatttattatctcaagtggatcaacagatatatcatctaattcaagatggaaaatttttgagtgattaaacatatcatgaattttatgatgaattaatttaaaattctctattgaaagttgataaactacaaattttacatttcttatgtgattgaaaacatctgatgtctccttatccatacttaatgagttaatggaatgttaaaatctttacttataaaaaaggggtaaacaaaaatctgtgcttaaataacggggataaaaaatgaaattaaaaatgaaaaacaaagtcataaagggaaattattattctctccaagtaccatcatgaataatagttttattaacacctttaacagaaacaatattatcttcaactaatataccacctgtactaccagaacgaggttcattatcatgatcaatattattaaataattgattattttgttttggaactggtataccataagtattattcaggaaagatttctttactttctttaaaggatcatttggatcattaggtgaaccaacatgacaatcatctggggaatcacatcttgatgtatgtcttgaagcattattataaataccttgaattaaagctgatgcttcagatttgtgaatttgatgattattatcatcaacatcaatatttttatctattatagtatgattgtcatcatcattatcattattatgttgattatgtttattattattattattattattattatcatttttattattattgattgtttcaagcccgccataatttaggtatcatatcaggtggaggggataatgatgatctttcactattatttgttaaaacttttctgtaaattagttaaaggtttattatttggagaagttaataattgaggttgtttcttaattgtaatatgattattatttgtctttaaaggatcagaagctaaatttgaaggtttaataccttgtaaagttttagcaaaactattttttgattttgatttattataattatcctttgaaatataagcttgaccatttaaattatgagaattaattgtttcagttgaagtgatagatgttttgcttgttgatttatacaaattatgaagatatgaagtaacatttctttttgataagggaccaggtatttctcttttgatatttttattaacatcaatataaacatcagtttcatcaacaatttcttcaccgaattaattcttcaataacatcttctaatgttacaacaccaattgcaccactatctttaccaggactttcacttacaacaaccatatgagatttaccttcttgaaaataatttaaaatatttaaacaagaagtatttaatgaagtttcaggtaatgttgcaagtgggaaagaagaaattggtaattcatcttcaggatcataagagattaagattctaactaataacataccaacataattataaggttcaccagggaaatgaattggaattcttgaaaaacctgcattaaaaatttcttcaacagttttttcatctaagattttatcagatggtaaagtataaactttttcaattggagtcattatatcacaaacaggttttgcctttaaatctaagacaggcattaataattgtaacttcatctaaatttaatctttcagtacccattgtatgatgtaaattaactaaactttttaaaccatttttcctataaaaagttccatgatcttcacctaataaataatctaataatttagcaattggataagcaattggatacattatatacattaagattaaaacataaggagcaaagaaagcacctaattctaaaccataacgaacacaaattgattgaggtataatttcaccgaaaatgacaattgcaattgttgaagagaaaacagctgcaaatccaccacctaataatctatctaatataacaggtaaagtttcatttgtaataacatttgataataaaagtgtaactaataaccaatgtttacctctacttaaaagagctaaaactttatttgaacattttttttcattttcagtaccagatgaagatataactttaagataaacttcatcttgacccattaaaccaagagttaaacctgcaaatacaccacctaaaaggacaagtattgaagaagtaattgcataaatatataattgactttgagttaaaggaatttgttttgtaacgttcatacaactatcattgatattatcagtaatagtattatttgataataattttttaattggatgtaattccactggaattgcatttgatattacaggataaatagaccagaaaagtttaataatttgagattgagatgaacgattgggcggcattcgataattaaaaagtagaatttaactgtaacaggagagggaagctgtagagaatggaatttaaaagagaaataaagaagtagtaattataaatataccgtgttaaccgattattattatgtaaaggctgataatgatattcctctcagatgttctctcatggctaggcaaaatttgttgtggcaaagacgtgtgtactaagtattaaaaataaaaataaaaatataaaattcaaagatcgtattacgtaatgaatttctttaaaatatttatttttttcacttttgaaggtcaaatttttgcccctttttcaactttatagaaggctcattaatcttttcaattgattgacatgtattctcttcttttgggataatcaatctgcttatggctaatcgtatagcatatatcaggagtactttggcagatttatctaatctcactactagttaatagtaatactcccaattgggaatctgtatttcaattattagataaatttaatcttcaattaaataataattacattaacctaccgaatttaaatacttatttgaataataagcttttaaatttattaccaaaatatgaacattccttattttcctgtcaatgataataataatcaacaacaacaagaacaacaacaaaaaaattattcttatataatcaaatgtcaaaattttattctaaagaagaagtagaaggagatgaaattttaaattcaaattcaaattagattcaatttcgatttcccaaattaattatctaaaagctcatataattaaacatgaaattcattcaaattattttcaaattagaaatcatagattaaatgaattatcaattattaaagatcctctattctcaaatgaattattagttcatacttactgtgatgttgaattaattcattttattaaattattaaataatgattccttccttcatagttcctatttcagatattatgaacagatttgtaaacattttaataaaattttaaataatactaaaattaataaaggtaaaggtatttgttcaaaattaagaccttcagatttagaaaaattaattcaattatttatttattcaaataaagctttaaatgtaaaggaaagacaaaaattgaaaattaatgatataattaataatattattcaagatttgaaaaattcaaatttaaaactttcaaacaaagaattatttactttattacaatttacattaaagaaaaatttaattaatgatgaaaaaaataatgaaaataccaattcaggtgattcaggtgaatcaaatattattaaattatatgataatttcattaatagtacaacttttgaaaaagatagtgatttctttattaattttttaaagttaaatatttcattatcatttggaaataataaaataactagtaaaacttttgtggaaaagattttaaaagatattgttaaatataatgttccaattgatagattaatgttaaaatatattcttaaatttgcatcaattgagaaaaactcaatattatcacaaattattattcaacatattttagaaacttaccctctagatagtgaaacttttacaatggttcatttggcaatttccaaattgagaggtgaagaagagagtaaattattgaataaactaacaaaattaaacaatgaacatgagaaattaattaaaaagtctccatcaccaccatcatcatcatatgaggaaactagattcaacacaagaatcttagatcatctcattgataaagaaagtgatattattactgataataatggatttctttatagagagaaccggaatttacttataacaccgaagcttccggcatgaaaaaacggaaataaaacttaaaattttcaacgagcgaattgaattgaatttttccattcctcccattctacccgatgtttgatgttgtcactactaataaaagaagtaacatgatgttttctcctatactgattgacacttattccactggcacgtttgtttattcaattgcattatcagattaaatatattactctctattacaattgattattacagagatattatcatcattgtctctaacttagattaaatacaaattatataccccacaatgcctgtcaatggttttttagctaaattatttaaaagtgataaggataaaaagaaagattctcataaatcttcaaataaaagtttatcatcatcctcacatcactcatcaccatcaactacatcacaatcagatttaccaattgtatctcctactcatccaagatatagttccaaatctgctgtttcttcaagtaattcattatctcaattggcttataaaaattcaaataataatgataaaaatgtttcatctactaatatgacaccatcctcctcttcaacttcagtaatacaccccgttgattctcataatcatcatcctcatcttaaattagcaagatttctcgaaaaaagacatttaaaacacagtgattatctcaaaaataataataataataataataataacaataataacaataacaattcacaacctttagtacacaaagctttatatccttcaactgcatcggtacaacatgtttcattaaataaacctcacagctctaaattcaataattatgaagcactgactgaacttgtctctcaatatggttatattcctgaccaatctgttgacttaatgaatttgttagaacatactgatattaactatgatgttaaaattggtgaaaatggtaaagttgaaaaaagtaaagaagaaattattagagaaactagtaaagaaaataatgaagttatcgaagtaccgagagcatatactgaatcaactgctttagttattggtaaaggtgcaggtggatcagtttatccattatatgataaacaaaataatcatctttatgcaatgaaaaaattaagattacagtcatcaaaggaagattggtcaacttatgaagttaagctaaaaaatgaatttaaaattgcaaataaattacatcatcaaaatttaattagaacttatgacttattacaagataacgatttatttataattataatggattatgcaccatatgattttttcacaatggttatggcaggaattttaacaaaatatgaaatttattgttatttcaaacaaatgtgtacaggagttcattatatgcattcaattggtttagctcatagagatttaaaattagataattgtgttgttgataaaaatggtattttaaaaattgttgattttggttcatcagtcattttcgatgaaaatctttatttaaaaaggggtaaaagtgaaaaaaatgctagtgcaacaggtattttaggtagtgatccatatttagcaccctgaagttgtaactgtaccttattatgatccatcattagctgatgtttggtcattagcaattatattttgttgtatggttttacgtcgtttcccatggagattacctaaaaatactgatatttcatataattatttcataagtaaacctggtgaaattattgataaagatggtaaaaagaaaattgttggacctgatagattactgagattattaccaacatcatcaaaacatgttattgatcatatgcttaaagttgatccaagagaaagatataatatggatcaagttcttgaaagtcatttttataataaaattaatgattgtcattatgacaattatgattcaaatagaaatagaggtactttagttaaaggtactgatcatgttcataatttggttactaataaacaattttctgaggaacatcccgatgaagttgtacaagaaaagaaaagagaggaggaacaagcaaagagaatactgagtggtgttatgtaattacgattcactcttgtactaatatattattactctgacatttttcctttctatttataattatttatttaaaaacttgcttaataattccggcaataatatacctttcttttctgtgtgttgtgagagtatacagttaagatattaaagttatagattattataaaattaagaaagaatagatagacagaaagatatgaaattaaatttcagaattatagataattgaaactgattcaccattattaattcttctaattgcttcagcaaatatccttgaaacatctaaaatatcacttttaacattaaattgtttattttgtaatctgtttgattgatctaaagtatttgatgtaataacttttgtaaatagacctgaattttgaattttttccattgcatcaccactgaataaaccatgagttacaattgcataaatttcagttgcaccatttttttgtaataattttgcacatttaattaatgtacctgcagtatcaactaaatcatcaacaattacacatggtttattttcaacatcaccgactaacattgataaatctaaattattaaccttggttcttctctctttatgaactaatgcaaatgataatgacattgaatctgcaattgcagcagctctctttgcaccacctgcatcaggtgaaattatgacagaatctttaaaatttggaatgaaattagaaatataatattggactaattgtttaggaatataaattatcaacgggtatatcgaaaaatccttgatattgagaatcatgtaaatccattgtaataatatgatcagcacctgcacttgttaataaatttgcaattaatgtaccattttgtgcaatccaaggttttgaagattcttcattattattattaatattaatatttttatttaaattacttgatttttttataaaatcaccatttttaacaactggcatatctaattgacgtgaatagaaaaataatggcattataacattaatcctttttgcacttgccattttacatgctgaaatcattaataaaagttcaatcaaatgatcattcacattacctgcaccactttgtaaaatgaaaatatccttttcacgaactgatgtctctaattgaactgatgtttcaccattcgcaaatttttgaattaaaactttaccttgtggtaatgaaagattcttacaaattctttgtgtaagtgcaggatttgatgatccagaaaatataacaatatctctcattatttatgtgtttagtagttgtttgcctttagaaagtgaaagaagaaagctacagcttaaattatataaattccccagacttttattgaataaaaaaattctttaaaaaaattcatgcaacgaaataatcatgctaactttttttttcatccaatttcaatcactttatcattcaattctgatcacttaattattcagattaatgtcattctcagatatatataattatacaatttaaatgaatatacacacataatagtaaaaataattataaaagaccatttctattgttcttacgttgtttttgtttgtaaactctatatccaataacaactgcataacaagctaataatattaaaactaagtaaaagatcattttgataaatttccaaactaatccaaagaaccaaccaacaaatccatgttctgaattatatttggctttatctgcttccttcaatttcttttcttgtctacgtaaacgattaagtgattttctagcttgacgtcttctatttaccataccattattatcattattgtcgtagttattaatatactcatcagtatcataaacttcaataccttgacctaatgaatcaatttcacttatttctgtaccatctttatttctgaaagttttaacattaattgaatataaatcaacattatgatgcaattcaccagtttcagctgagacaccaagatataatggtctaccaattgggaaaagttcatcaacttcaacattttcctttctgaagcaagttctccaatcatttgtaccttcaacatctgcaataatttctaaaatatttgcttgacgaatataagtaatttttaatttacttggattattacttttatcagtattatatatacgatgtaatgcacaaccacctaattgagtctctaaaccatcctttaatttttcataataattaaatattcccttatttctttgaatacttaaatatgggaatgcatgtctatttcttttaccgttataatttttataagtatcaaggaaaaaacctaaaccattaaaatcactttgcataccgaaaacatcacctgattttaattgttcagttgttaaccaaattgccataccatcaccaatcatacttgattttaattgttcaccatgaattttaaaatcaacttcaatttcaattgctgataaatcttcagttgaagttgttgaatgtgagaatagattaccattttgtcttggtatatcctttgtgagtctgacataatctgaatttctggataataacatattaccaccatttttataatgtgggaacttattacttgaatcaaggaatggcggtaatgataaataatttaaattaacttttgaaacttgtggtgaattatttagtaaatcacttaatgtatggaattcattacttgaaatacgagtaatatcattattattagacactgaattatccatcactgatatcaataacatttttagaactagaacttgaccaacttggtaaaaggaaataaaatacaattaaacctataacaccaaatactatcttacccttaggtgttagtcgagaataaattcttcttaacttatgtagaaaacttggagtcccaccagtttggtattccattgttaatcagtgttggttgtcgttgcttgtaagttcaaaagagaaaacacggtgtcaacatatatatatatatattgaaagaaccggaatttcaaatcaggtcaaatttcagtgattcgagaaacttcgtttctatttgatactccaaggtattttaacggttataagttaacgataagttaagtttattattatgtaagtaaaactatatatgggatgtttatatgatgatgatagtgatgaagattatgattatggacgttgatccattgtactacccattgtagccattgtagccattgtagccattgtacacattggttccattgtttcacttgatgcattaggttcaagtaatgacattgcaccaattgattgtgaaacatccattaattcattattatcatctccatttttctttccattattatttgcattataataatgattattataatgatcaactgtattataatgaaattctttattggtatttgtatttacattggattcagattcttcattaccacttttcttactctgtatacttgttattgatgctaaactatcattactattctgtgatacattaatagtagaatatttgttatcttttccatcatcattttctttaacttctatattattatcagttccattattttcattactttcatcattattggtattatcatcgtcattatcattatttttagtgtttttactaatatcattttctttatcaccatttgtaatagtttttctttgacgacgtttagtaatcagtttcttacgtggacgttcttgacctaaaataactttagtattatgaccaacaccaggcattgggaaaatacttgtataatttggtataattgtattgtttgcaattggttgtggtaaatgttgaggttttgatttttcattatttcctgaacgatgatgatgatggtgatgatgatggtgatgatggtttccttgtgtattttgttctgcttgtgcctgtacttttgcttgtgcttgagctctggcctgtgcttgagctctagcttgttgttgttgtaattgtaattgttgttgaaattgctgttgctgttgtaattgttgttgagcttgtaattgatgttgaaattgttgttgcagatggtgttgttgtaatttttgttgttgaagttgttgcagttgtatttgtaattgcttttgttgttgttcttggatttgttgttgttgttgtaactgtaattgttgttgttgtaattgctgctgctgctgctgttgttcattatcatttatgttaggtgaggaacttctaaaagtagataaatgaggacgatggtgtttattactaaatggaccacgagatttcaaattattacttgattgtgatgaacttgaattattaaagttatttggattataaccaccaggtccatatttgaagaattttttaaatacgttttcatgtttatgaacgtgttgttcagattgttgattattttgtacaaggttttgttgttgttgttgttgttgttgttgttgttgttgttgattatatgtaagattttgatgtgttggagttgaaaatctttcagtttgaggtaaattagattgagatgatgatgaaactgaaactgatgcagatgtaaaatctgaagaaactgatgaagtatctttattattatttttattatcgattgatgaacaagagtctgtatcaaaaccaaaaccacattctgtacatgatttacattgttttggttttttatgagcatctttattattgaagttatttttattaactccaccaatacccggtatatattcattttcaacttctatttgatctaaatcttcaatttcacctgatctaattttatctaaagcaacatgatcaacaggtattggacaagtttcaaaatatgaagtattatcagagaattgattattactaccatttggtataatattaaatttattatttttattattcattaaaatcatttgagattcagttgtaattatatccattgaatgaattgttgaatcaattgataatggaccactatctgataattttttacagtttaatatatcatttctaaaatcaaacaaactacctctttcccaaggatttaaatcaagatatttaccaagtataatgaaaatttcttctgaaattggtaaaattttcattaaaattcttggattttgaacaaatgctttaaaagttgtatcatgtaaacttgcctttaaccaaggatttctaattgatattaaattaattagtataattgctaatgaccaaacatccccagcactcgttgggaatttaacattaccatgaacacgataatttgaatcattaaagttattattattattattgttattattatttccattattattatttgcattatcattattatttatattcattaatctttctatatgaattgaatgagattctaaggaattaaaggcttgactaaaattttgtattctttcaggagacatataataacttgaaccacaagaaatatttgaatttatgaatttatcttgtaatgctaaaccaaaatcagccaatatcattttttcaccattattagcaattaagatattttcaggttttaaatcacaatggaaaacagattttgaatgacaataattaattgcatcaattaattgaatgaaaacagatttaattaagaaaggatcatctttatacctttgtttatcaacaattgttgtaaataaatcaccttcaggataataatccattataacgaaaattgaattttgaaaatcataaactttataaattgataaaatatttggatgtttatgaacttttaattgtaaactaatttctcttaaaaatttacaatcagtaccataattttcaattgaatctaaacttaataaatttgcattaagacaaccattattaagtaaagattgataaattaaacttttctccagttcaattaataattgtttattatttgaagtatttgaactattattttttaaaataattttaattgcataagagataccagtatataaatgaacagctgaataaactataccataagaaccagaaccaattcttttctttaattgatatttattatttaatattatattagataaatctttcattgacatgatgatgaaggattattattattattattttagtttatagtttatgatattgtgaaattattataatgatgattaaattattaattaatgatgattaaattattaaaatgacgataaagaaagaaataggacacgagaagagaagaggggccagggatatatagagatcaaattaggagtatatagattcacctctgtaatgagttattataatattaatattatttaagttaaatagaacaatattaatatacttataagatataagatacagtctcgtccattgcatcattaaatgagttgaaattcatcagaccatattttaacgatgagtgatggagatgaaaagagagagttaaagattatcaccgttatgttcttccatccatcctatctactgttaagatactatagtgatggtatttacaagacactgtgcatttgttatattacaagttatagatagttatagatatagtctatagatatagtcaagattatcccctttttactatatactctaagtactattactatgaagtaggcaaattttaaatttcaaaaatcacgttttcgagcgtatttattatgaaggctcagttttagttgggtttttcttgcttttattcactttctttgtttgccttttcttttcctttggcttttctctttgtttctcataagaaggcaatattatttaaaccatatgcgtatatgtgtactcttattggtatctattatatgagatactatacactaatacccgtaatcacttaatactactacatactattactatactataacacattacattatactgataaacgagacaatattacctaatcaaaatataaattttcgcgttgaagaaaattaacattaaaatcaataatttagtttcccaacttgattttatcggatttatattactttgaaattgataaattattaattttgatactagaggacatacttatattaattagatcatcaatatattcaaacacatcatacaatggcagtaattgatgatttttttggtaaaaaaactgttcaacagaataaatctaaacgtaaaccatctgaaaatattactcaatcatcacctcaaaagaaacaaaaatctgttaattcaactacttcatcatcatcattattatctgctgatgatatattgaaaacaatccctgatgctgatccttcattacttgaactatcccccgatacagaaaaattaaattatttccaattaaaggcaaaacgtgaatcaaatccaacattaaataatactactacaacaacaactgatattaatgatatacctgaaggacgtgaaaattgtcttaatggtttaacaattgttttcactggtgttttacctaatttagatagagatcaatgtgaacaattagctcaaagatatggtgcaaagataactaaatcaattagtggtaaaacttcattagttgttattggtaatgatgcaggtccaagtaaagttaaaaaaattaaatctttgaaaactaaatgtatcgatgaatccggttttattcaattaataactaaaatgcctgctgatggtggttctggtgaggctgcaattaaagaactaaataaaaagaaagaaatagaaaatgaaattaagaaagaaattgaagaagaacaaagattagaggaacaaaatgcggtaaagaaacagtcctcaaataacccatcatcctcttcatcctcattatcagcacctgcacaaccaaaagtagttgataaaaatactcaattatggactgataaatattcaccaactgatttaaaacatatttgtggtaataaaagtaatgttgaattattaaaaaattggttggaaaattggttcaatacaaaacatgatttaaaaggttctactattaatgactttaaagctgttctaattagtggtcctccaggtattggtaaaacaactgccgcaactttaatctctaaattattaggttacgaagtaattgaaaaaaatgcaagtgattttagatctaaaaaaattttaaatgacaatttaaaagtttgtttagataatacttccattaaaggattttttgatcataataatgataatatgaataaaaagaaatttgttttattaatggatgaagttgatggtatgtcaagtggtgataatggtggtgtttcacaaattgcacaattttgtagaactactaaaactccaatgattttaatttgcaatgacaaatcattaccaaaaatgagaactttagataaatgttgttttgatttaacatggagaagaccatcatccagagaaatgaaatcaagattaatgtcaattgctcatagagaaaatttgaaattagatccaaatttaattgatcaattagtttcaattactcataatgatattagacagattattaatataatgtcaacagtttcaagaaatcaaaatagtttaaatcatggtaatttaaataatatgcaaaattcttgggaaaaggaagtttcattaaaacctttcgatattgttggtaaattattatcaaataatagattatcaattaatgaaaaaatttcattatatttcaatgatatggatattgttccattaatgattcatgaaaattataaaatgacacagcctgttggtggtaatggtggtagtagtagtaatagttcattaaatcatcttaaattattagatgaagcaagtgatttaatatcagagagtgatattgttaattctaaaattcgtagtggtgaacaattatggtcattattaccatttcatgcaattttatctacaatttatccatcatttaaaattcagggacaaattacaaatagaattaattttacaagttggttaggtcaaaattctaaaaagatgaaatttgatagaattgttcaaaatttacagtatcatacatgtatcaaaactaaatcaaataatgatgatttacgactagattatattccatttttaaaggataaattaataaatccaattgccgaaaatggtaatgatggtattgaaacagttttaaaatttatggatgaatattatttaacaaaggaagattttgataatattttagaactaagtgttcatggtagtcgtaaaattgaagataagtataagaaagttcctacatccgttaagagcgcatttacaagaaagtataattcatatattcacccaacagttatttacaaaactggagattctgtcggaaaagggggatcaaataggctatcccgcggcgattctgaaggtggcttggagggtgaagacggagatggggatgttgaaagggatggtgataatgatgaaagtgatgataaagatgatgatattagtcgagattctcttatcaagagtaagactagacctagcggcggtaaagcaggtgctaaaggtagtgctaagagcaataccaaacgaacaacgggtggttctaagacaggcaacagtcggaaaagccggacttaagaaattttcaatagcagggtatttttaaaaaattgatttcttatgaaaatttgtattatataatgatttatgtacaatgcatattattaattatgtaccttatttccgttttaatcacaattggttcttgtatctatattttataatctatattttataatctatatttactattatagtgacatagtctaacaaccataatcttcatataataattaaataatggaggtcttagaacaatatgcaagtgcattaccaactggtcttcagacaaaggtatcccaattaacttcaattccatcaataacatctattccttcaacaatttcacaaaattatgaaactattacatcaattatagcaaaggcagaattacatcaaagatctgcttatagtgcattaaatgttgtaactgcatcagtttcatcgattagtttaattaatgatattattcaagctcaagcaactttaaatttttacaatgtattagaacaagctgcaactgtaactaatactgcatctcatgcaagtttaatgacaaaagctgctcaagcaagtgaaattatgcttgaaatgtttaatgatgaagcttactatagtggtaattatccttcatttggtggtaatattgcattagttgtagttttttcaattttcttgacatttcatgttatttcaggcgtcttctatcatcaatggtggtttttattttgttggacttgtggtcttgctttagaaatcttaggttatgcaggtagaatttggtcatcacaaaatattatgagttttgatgcttttgttatgcaattagtttgtttaacattaggtccatgctttctcatggcaggtatttattatgttattgcacaattaactttaatctatggacaaaaattttcagttttaagaccaatgcaatattcatttcttttcatcattggtgatttaatttcaattattttacaagctgcaggtggtggtgtagctgcaggttcattatctcaatatgaatcaacagaggatggctctcatattatggttgcaggtttagcatttcaagttttcacaattgctgcatttcaaatattttggtatattttcttttttagagtttatcaaagttataagaaacatggtgattcagaatttaatccacatttcactcatattagggaaagaaaattcttgttccatttatttttggtatctcatttgcagttgttttaatctttgttagatcaatttatagattaattgaattagctgaaggttggtcatcaaatttagcaacaaaggaaatttatttcatgattttagaggcattaatggtttctttagcatcatgcgttttaacatttttaactcctggtttggcttatggtagaaattctcatctttatattgataaatcattaaaggcaacatttggtaaacattataagaataataaagatcatgcaatggatgatccagaaaaggatgaatatagtagttacaataaaaatgatatcacatcatccaaaaattattctgatgatctcggtttagatttagatagaaatgaaaatagacaatatgttgtttaattatgatgttatcttataactaacacttaccggctttcattttaaattcactttttaattcgtttttattaacacactcaatatgacattacattattgatttttatttattgacatttattttattctaattaactgattcaaattatgatttattcccatttttttgttttttttccccagtttaactaattttttattctaacggtatatttacaatgtttaagttttatataaatttaaaaaacttttatgtcttttaaacaagaagaaaagaaagaatattaccatttaaaaacttttaatacatcatccatacacacttatatacttatacttatacttatacttatattaatagttggttaccaactgattgcaattgtataacctactccaaataattagcaattgaaataagctgattataattaagtttaaagtttttcctcatgcagtgggaaaaaccgtttctttcttctatttacttttcattttaatgatcttctttatttaacttttcgccttagtctacttcttgttttttatatctattctgggtataggtatcaaacaacgtatatagtacaataatgtgctgattagtgaaaggaatgtaagtgtttgtctgcagaatacattaacaaaactttctcccgtattttcacccgtaatggaaatacttaactataggatgatattatattgattatctggtaaattctctacttttaatcacacatctaattaacaattttcttataataccattcagcaatcaatcggtcgacattattacacacacaatgcatttacttgtaatgtgatacatcacaaaggcaaaataatcacatcaaaatttttcactagcccatttacacattacgcgtatcagcattagttctattgtaaagatcagttctaatacattttcttcactgaaatcaccaacaaatgctctcattcaaacgtctcaactctactttgaggttaaaaataccattacccgataatataaggaagctaaaagaactaaatcatactataataaagaaaagtgataatgataaaattgttaaaaaacgacaatactcagataacgaagttatggataaaataaatagtatatgtaacgttctttcagttcaaaacgatattgctgatagtaaagatgtaaatgaagtgattaatttaaatatagcatctaataaattagttttggattctacaatgtcaccaaatgataaagtcaatgctctttgtaaatttctctcagttgattcaaatagtgaatatttaccattaaaaatatcagagaatccaagattaaagacaccatttgaggaattatgtgatattaataaatctaataaaaataatgataagtcaagattatcagttactaaaattataccttattcttattgtgaattaatgaaaatttatgaattatatttacgtgataaaaaagttgataatattaatattattaaaggtaaacaaattcatagagatttagaactcgataatcatcctcaaatgaaaatatcaattcattctaatgatggtgataatattgtaggtatcgataaaccagtttcaataatagataagaatgatccaatctttgaagttaaacgtgatattccattttcaaatattgataaaatttcactcaaaaaactggttacccccgataatactattgaatcagatcgtgaaaggcaaattaaccacttaaatcagttaggtgttgaaccaacagatgataacgtaggtatccaaacaaccaactatgatagataaaactactaaagtagttcctgaagtttcaaataacgaaccggctgattgaagtgataccagtaatagaggagactaaaccagattctgttgaagatgaattaccccttgaatcagaaattaaaaccacaactgatgaacaagcaatgtttgaaattatgagtgaaactgcactatttgatacacaattacataaaataacacaatcaatgttaagaacaattaatttatttttcaatggatcatctagagaagttttggttcatggtttctattcaccttcggataatgctttaagtaatattgataatttaaaggatggtgttattataagtggtataattgatgatattactattgcaagtaattcagaaaatgcatttgaagctttttcctaaagagttgaagaaagaattagatggtgtatatgatttagatattgtgttccagaaaattgaagagaaggttaattattggactgatgaaaattttaaggactctttactatatctagttatcaatgatgataaaacaactgcacgtgggaatgtaccgaatgcacagacaagatgtaatcatttgacacaagttggtatttatggaatgttattaacaaatttagttaaaaatttgaattttacatataattcatggttagagaatttaatttcaagaggagaaaatgttaatgaaccattaaataatgatatggtatcattttgttcaattttaagtgattatctcctgaatgatttcctcaaattgaaaaatggtgaaagtttttcttttgaaaaaaataagatatcccatacaagttcaataactgaagaacgttataaatttactaataaatcaaattctaaaaaattggacattttaaatggtgagtgggtgaattcacctacactatcacatattataatgagattagcacagtctcaaatgttattaaaacctttaatttataataagactcaaataacttatatttcacaactaactcatgaacaagttaaagttattgaaaatacttataattccaaagaaattaaaaatcaagttgatttaggaatggatttatggtttggtaaaagagatcctgaacctacaaataatgaaagaatttgtaactattgtatgttcaataaaaaatgtcaaatacccaaaaaacgtttaggtttattataatagtttttcacatgttgcttaattaaaagtacataatgtttatatagatgaattatagaaaaataacaattagtgtgtaaattaatagataattaactaaaacaaaagaaatagattaatcaaaaattataattaaaaaatttgaaaggttggaacgagtttttcaaaatattttatttggaacatataaaatttgataaattaatttcaattgaagttggaacatagctaaaaatctgaattaatttgacgttgttgaattaaaataaaagaacatttattgataaacgaatgaaaaaaatggtaaaaaaaacttggccttcccttcttctctctgatttttcccctatgaaaaataaaaataagtttaataacaaagatacccttctcaaaagtatcagtgtttaatagtaaattgtaaatataattgtaatatggtaagaaaaaaaataattgattgattgattcaataagaataagaatcactcttataacatcataactaatgcaaagacaccaagaacaccacctgcaatatttgatcttgcagctgcaccgttataaacggaaacaatgttttgttcagcaccttcagaagttgaagcagatgcagtagcagttggggtaacagttggaacagctggagtaccggtaactgaaacaaaatcggtaatagtaacaacagtcttgaaaacagaatcactactggtaccggtaagagttttttcaactttaccgctgataactggacaagtagtattaatgatagtaacagtagtaccaatagtaacggtttgattaactgaagcaacaggtctttgcatttggaacatcaacagcaactggacaataagtagtgtatgaggtaacaacttcattaacggtagcaacaataacaccaccaacagctgtaacttcatgttctgaacatttgttatctgaacaagaggtaatagttttagtaatagttgaaccaataacaactgtttcaccatctgataaaacgacagtttcaccattagttgcagtggaagaagcaccagatgaaacagaggtaatagaacctgaagcagataaatcatcagatgatgaagtaattgattcagtagatgatgcagtagttgattcagtagttgattcagcagatgatgcagtagatgcagaagatgatgaagtagttgcagatgtagcatcctttgaagcggttgcttctaaactaatagttaagacatctctcttaacaatagcgccagctgggataacatctaattctaaaacaaagttaccaacaaaaacgtcaataccatcttgatgagtaccagtaattgaaatttttaataaaggatcttcagttctaccatcaaattctaaaccattttcagaagatgaataaataccaactgggttaacaaagttatcaatatcaccagtataaagaacaaatgaatcaacgttgaatgaaccaccagtgacagattcaagaattaaatctaaaccagctaaattataaactgattgtggaacatagacatcaaatgtaatatcagaatcaccataaataccaatagcagttggaactgaatattgatttgatggaacaccggtataagcagcaccataaactgaaacaattgaagtttgagtttcaattctagtttcacaagttgaagatgaatttgcaaatcttttttcaagattgaaagcagaagcagttgaggcaattgaggcaagacctacaagagcctttgctaagaaattatttaacataaccatagtttgagataggggaaaaaccagagaaaggcgggatgtccaaaagaagcaatatacagtaaagaataacaatataatgataaaaaatgtgcgaaacccaggtccttttatagaggaaaagtgggaagagcggaagaagaagaaaaagaagaacaataagcgaatatctgcagatctttgaattttaaactttccctttgtttattattcccgagtctttattttattattatatataggtaaaaatggctggttatatattatgtcagtatcatagacaatcctacagattatcaaaatgaataatgctccctttcctgcaataagttacggggctcaaccaaataataattttgattaactacagtacaaagaaatatttttttatctcccaatgtggcttaattaaaagtacataatgtttatataaatgaaaattcttaaacaaaaaggtatgaaaacataaattattaacttcaaacaattgaattagaaatttaatttaattgaagctggaacaaagttaaaaatttaaatgaaatcatacgaatggaataaccatttattggataaacgaatgaataaaatgttttttgtttttttttgtttgataaataataacctttccctccctctctctaatttttcccctatgaaaattagaaattgatttaattattattgaaatagtatgtgttaaactaacagtgataaagtgaatgaataatctaatgaatcaaattataaagatcaaccttataacatcatcattaaagcaacgaaaccgacgataccacctgcaatattagatcttgcagcttcaccattatagattgaaacagtgtttcctgagtctgaacctgagtctgaacctgaacctgaacctgaacctgaacctgaacctgaacctgaacctgaacctgaacctgaacctgaacctgaacctgaacctgaacctgtacctgtagcacctggagcagctggagcacccgaaccattaacaactggagtagttggagctggagctggaactggagtagcatagacagagacaaagtcagtaacggtaacaacagtactgtatgaagaaccttggtaagaaccagtaatagttgtttcaacttgaccattgacaattggacaatcagtattaatgacaacaatggtacctgcaatatagatagttttatcaattgaaccaacagttgcaagtggacagtaagtggtgtaagtggtgtgaagatcaacaataactgaaccaacagcagtaatttcgtgttctgaacatttgttatctgaacatgaagtaatagttttagtaatagttgaaccaataacaacggtttcaccatctggtaaaacaacagtttcaccttcagtagcagtggaagaagtaccagtaattgaaacagaagtaatagtacctgaaacagatgagtcagtaccggtagttgattcggtaccagtaatagaaacagaagtattttcagctgaaacagatgagtcagtatcagtagttgaagcagtaccagtagtagatgcagtaccagtagtagactcagtaccagttgttgattcagtacctgtagtagaaacagaagtattttcagctgaaacagatgagtcagtaccagtagttgaagtagtaccagttgtagattcggagccagaagtagtaccagtagttgattcagtacctgaagcagtagttgaagtagtaccagtggttgaaccagtagaagttgttgaatcagtacctgaagcagtagttgaagcagttgttgaagtagtaccagttgtagattcggaaccagaagtagtaccagtagttgattcaatacctgaagcagtagttgaagtagtaccagtggttgaaccagtagaagttgttgaagcagtagttgaagcagtagttgaagcagtagttgaatcagtagttgaagcagttgttgaagcagttgttgaagcagttgttgaagaagttgttggagcagttgatggagcagcagcagcgatagttgcagttgcttgtaagttgaaagttataatttctctcttaacaagagcaccagatgggacaacatctaattctaataagaaactagcaatgaaaacttcagcatcttcatcttgagtaccagtaactgaaattcttaataaaggatctaaagttctaccttcaaaagttaaaccatcttcactagttgaataaatatcacctgctctaataaaattacccatatcaccagtataaagaacaaatgaagatgcatcaaatgaaccaccaacagctgattcaagtaattaaatctaaacctgctaaatcgtattgattttgaggaacataaacatcaaatgtaagttcagttgattctggtgtaaaagcaccttgagcagctggtacagtaaattgatttgatggaacaccagtataagcagaaccataaactgcgaaaactgaagttgaggtttcagtaacagttaaacatgaagttgaattatcatatcttttttcaaagttgaaagcagatgctgtagatgcaattgatacaagaccaacagctgcctttgccaagaagttgtttaacataaccattatatgagataggggaaaatcaaagaaaggcggggtgataaaagagtaaaatgaaaaaaaataaggaaaaaggtagaatagatgtaaagttgaacaacacctacaaagtcaaaaaagaagggaaaaggtccttttttatagacaaacatgtggagagatagagtatcaccatgttaaaagaaatagaacacggtaaaaagtacgatcaaacgattcattgcattaaaatgacaattatttcaagacaatgaaaaaaaaaattttgagcaatgtaccgtttctattacccagttaggaaaattagcaatcttcaatttatgactttattcgtttatattaaatttaaattatttattaataatattaaattacaaagctattactatcactatctactgaaaatatcatcttcatactcctcagcatcatcctcaaatccttcatcatcgtaaccttcatctgaatcgtaatctgaactatcaccatcttcattattttctgaattatcattacctgatgatgaactttcatagaaaacatcatcatcacttaattcatctaatgataaattctttaatgtttcaccctttatattaacattcttaccgaccgtatatgaaccttcaacattacaattaattaaacgactcttaatttctattttaacatttttaccaataatacaattctctaattgtacttcatcgtcaattttagcaccatctaaaataacacttgctgaaatacgacattttttaccaattttaacatttttaccaataacacttctcttaactgttgtacgttcccctaattcacattcctctccaattatacaatcagctccaatatttgcaagacttttattattaactgtatgattactattattattattattgttattgttctttgcttgttcctttaaatataatctattaatttccatatatgcaggtaaattattcactctaacaaataatgaatttttaggtaatgcaaataatccaattgttgatttactaattgaatgtttccaagaatttctagctaaatctcttttaattttattaatatttcgattacattcaatacctttattatcttcaatatttctacatttaccattcatgaaaaatataaatgaatctaataatttagttgaaactaatgtacttggatatctccataataattgtgtacgaatttttaaaaatttatcaatcataacaaaatcttttgaatacatatcaagtaaaaccatattaccatttgattgatctgaataaactgtataatttgtttttaaaacttttttatcaattgtttcaaatgaattatcatagaaaacacttaatccaacattttcatcactgttacctctataaacttcaattaaaacttgtggtggtaaatcagttataaaatcacatggtaaaataacataattttcattctcatttccattaattgggaaaatttcatttaatattgaaccagttgattttaattctgatgtaaataatttaattggactagaatttcgtaattcattatccctattattatcataatttttaacaaattcttcaataaatttttcatcctttgatgatgtaattatattaactgttttaaatggtgcttgatcacaccatttaagtacatattcaattaatggtttattagcaactggtattaaagcttttggaattcttgaatcacctggtgttgttaaaggtgaaagattatgaccttcaccacaaaagatgacagcattaaattccattgtagttagtgtttactatttaatgctataccgctgtatgatgatgtgtataatttattttcaaatcattaacattataaatggatgaatccgtcaaatttttttacttaattcagagactgtgagtaagtgagtaaagtcaatgattacgtaaggtttggatggttgaaattgccatttttccttactttcaccatttggcgattttactagtaatttcttaatccttttcggtggcaaatcagtatacttactgttggataatttatcgtaaattaagtgacaatgagtgaagaacacgatccattattagctgatcttgaaggagatgactctaatgaaaacaataataatcaagtagatgctgatggggatataatacccgttgaatctaatgttaataatgcgaatgacactaatacaaacacagaaatggatgtagaggtagaagatgtaccagaggaagaggaacaaatagatcctgcagagaaggaacgtcaggatgcactcaatgtattaaagaataaattagttgaacatttacattatgaaactaaattaaaggaaatgagaaaaagtttaataagtttagataaagattttaataaaactgaagatgatataaaggcattacaatcaattggacaaataattggtgaagttttaaaacaattggatgaagaaagatttattgttaaagcatcatcaggtccacgttatattgttggatgtcgttcaacaattaataggaaaaaattaattcaaaggtgttagagttgcattagatgttacaactttaacaattatgcgtatattaccacgtgaggttgatccatcagtttataatatgacaacttttgaacctggtgaaatttcatttacaaatattggtggtttaactgaacaagttagagaattaagagaagttattgaattaccattaaaaaatcctgaacttatttcaaagagttggtattaaacaaccaaagggtgttttactttatggaccaccaggtactggtaaaactttattagctaaggcagcagctgcaacaattggagcaaattttatattttcacctgcaagtgcaattgttgataaatatattggtgaatctgctagattagttagagaaatgtttagttatgctaaggagcatgaaccatgtattatatttatggatgaaattgatgcaattggtggtagaagatttagtgaaggtacatcagcagatcgtgaaattcaaagaactttaatggaattattaaatcaaatggatggatttgattcattaggacaaactaaagttattatggcaactaatagacctgatacattagatcctgcattattaagacctggtagattagatagaaaaattgaaattccattaccaaatgagagtggacgtttagaaatttttaaaattcatatttctaaagttcaaaagcaaggagaaattgattttgaaccattagttaaaatgagtgatggatttaatggtgcagatattagaaatgttataactgaggcaggatttttcgcaattagagaagatagagactatataattcaaggtgatttattaaaagctgttagaaaaatggttgaaaataagaaacttgaaggtaaacttgattatgagaagttataattgtaataagttgtataataaaaagtttagtttactgatttataattttttttaatgataataattcttatatacacggactatattattaatatttataaaaaaggaatctatatatggatgtaaatctatcttaattaaatatgaagatttttagttctctttaatttatattttgcttcaacgaaagatttaattttattcaattgttgattttcttttattttttcatcatataatttcttttgcttttcaataaataaatcttttggatctttataatcaggagaatttttattaataaatttagctaaatgaggatcagtaatattatttaaaaattgagatactttatcaccaactaaattaattgtttcaggtaaaggttttgaaggtaaattttctttaatttgttgtctctctaatatacctgcttttttattatcagataataaaggttttggaggtaccaatcttttaatatcacttttagttaaatattgtttatcccatttataaggtcttttcattaaaggatgtctcattgaatttattaaatcaattggagaatctgaataaattattgaatttgggaaaaaagttctttcattaactaaatttttattagttgaataaatacaatcttcaacaggatcaggtcttggccaaggaattataatattttcattatatttaattcttctataaggcatcattttttgataatcatcatcccaatattcacctttgaaaactaatttatcagcagcaattttcttttcagtaccatcatcattaacaattgtaccaacaacttttaaatcttttggatgttgaggtaatggataatcaattatatgagaagtttgaccaggttgccaaaattgttttggtacaacaactctctttgtttcactttgttcaaggaaaactctattagtttccttttgtaatgcaacaactttagttaaagtaccagcgaatttccccttagtaatcataacagtatcaccaggttgaactaaccattgtcttggattattataacgttcattttcatcaacttgacgatattctgaacggaatgcaggaatttgagctctttcttgcatttgatcaaacatttttctaatataatgaggataacgagaaagttccctaccataacgtttggaaccttgtttagctaatgaagacatggtttgtattggggtattctgattaaaaggatattctttaaatatacctctaactataatattactactaagtcttagttgaattattatcatgtcgagaaaattcaaatttgaaaaattttggatttgcccaaatagcaaatattatagaggaacggcatcacaattttagtgtcgcgtcgaaaggtcggtgtgcaatgtatattacgtaatattaaaatttaaaggaggctcatgtgattttaatagataataaataagggagtgtccccttttgatatagagtttaattaattaattatagttgtttattaattgttattaattgtttattgatatatctttatttctttttctcttattagttaattactctctacaacaaaaatggctaccgcttcatatagtaaacttcattttactgctattgatcatttaaattcttatcctgcaattgatgaaattaaatcatttatcttatcttggagtgtttcctctttaatatttaattcaattttaacttatattaaaaattcactttcattcctttctcaatatgaaattttcatctcttattggaattatttagatagtttattaaattcaactttatcattaattgattcaagattatcatttattaaaaatttctcatttatttcaacttataaatcattaattaaattatttaatgataatttaaattcattattaaatgtaacaagacaaccttttaataattttattaaatattttgatccaattttaaaatttcaaatgattattatgaatctttacttaatttaattttcccaacaagtgcattcacagattttaaaacaaaattgaaaaatattactaatgaacaaaatcaatttcaaagattattaaatttattagatgaaacttttaatagaattaatttaactgcaacaacagtttctaaaattccttcacatgtttcaaatgtttatcaaaatgaattaaaggaaactaaatcaacaactcaagcagtttcaaaaacaactagaaaattatcaaatgatgctttccaaacaattaaaccaacttttgaaaaagtttcaaaagctgttaatttaacaaataataatattaataataatattgataaagttactgaacctttaattgaaattaaggataatattcaaaatgaaatttctaatgttacaggtgttgaagttcattaattatgttaaatcttcttaccttatcttctacatcaatttccatacctttatttttttcttattctcttatataattttcatttcattggtttattcatttctacttttacttatccctctacttctctttacttccctctattctattctattctaccctatcctattctcttttacttcttctttttattgtatatcccgctggttacaacacttaaatacatcttataactatgtaactataactatacctatgacgtaatgttatattaatacgcggtgtttcactctttccagaacccttattgctatttttacattcaccaggttttctgtctcttcttgctctctctctttataagccttctgttatctctttatctttaccttagggacttgatttgttgtattctctatccgtttccttaatcttgattacagtgtcttttatttcctgatcagtttctgtaaatatattttcatatctcgatctaaattttgatctaatttatttttttcgtttcttttctcagttttcctttcttttacataagctgatgtgtgattcaataaacatcaacaataatgttgagaatttaaacttcatagatttcgatactaataaaattaatgaaataaataatatcttacatgataaggaaagtttcaataaaaattgtaataatgaaagttttagaattgatttaattaattatattgaatcattaaatactaataatttaaaatcaattgaaataattaattataaaactttgaaaaatcaagcttttaaaaattctcttaatgaaattggtaaagttataacttccgttgcaattggtgatttatcaaatagagttaaaattaatgataatgataatttaaatgattctgaaatttttaaagttaaaaaaacaattaattttatgattgatcaattggataattttacaaatggtgttaataaattagcaaatcaagtcgcaaatggtaaattaggtggtagtgttgaatataaagatgcaaaaggtgtttggaatgatttaattttaaatgttaatgcaatggcaaataatttaactaatcaagttagagaaatttcaattgtaacttcagctgttgcaaatggtgatttaagtcaaaaaattaaagttgaagctcaaggtgaaatttttcaattacaaaatacaattaatacaatggttgatcaattaagaacttttgcatttgaagttacaagagttgctagagaaactggtgttgaaggtagattaggtggtcaagctcaaattcaaaatgtttctggtatttgggaagaattaactgataatgttaatgcaatggcattaaatttaacaactcaagttagaaatattgcaaatgttacaactgctgttgcaaatggtgatttatcaactaaagttacagcagattgtaaaggtgaaattttagaattgaaaaatacaattaatggtatggttgatagattaagaactttcgttgaagaagttagaactttagcaacagaagttggtacaaaaggtattttaggtggtcaagcaaatgtaactgatgttgaaggtgcttggaaagatgttactcaaaaagttaatataatggcaaataatttaacaaatcaagttagatcaattgcaactgttacaactgctgttgctcatggtgatttaagtcaaaaaatttcagttgaagctcaaggtgaaattttacaattaaaaaatacaattaataaaatggtggattctttacaagttttcgcaattgaagttactaaagttgcaaaagaagttggtattgatggtaaattaggtgttcaagctgaagttaatgatgttgaaggtttatggaaagaaattacaactaatgttaatacaatggcatcaaatttaacttctcaagttagagcttttgcacaaattactgcagctgcaactgatggtgattttacaagatttataactgttgaagcaagtggtgaaatggatgcacttaaaactaaaattaatcaaatggttttaactttaagagaatcaattcaaagaaatacagctgcaagagaagctgcagaattagcaaataaaacaaaatctgaatttttagcaaatacttcacatgaaattagaactccaatgaatggtataattggtatgactcaattaactttagaaactgatttaactcaatatcaaagagaaatgttatcaattgttcataatttagctaattctttattaacaattattgatgatatcttagatatttctaaaattgaagcaaatagaatgacaattgaacaaattgaattttctttaagaacaactattttcggtgctttgaaaactttaagtgttaaatcaattgaaaaacaattggatttaatttatgaagttgataattcatgtcctgattatttaattggtgattcttttagattaaaacaagttattttaaacttaattggtaatgcaattaaatttacaagtaagggtaaaattattgtatctacaaagaaaattgaagatattgatgataaaattaaattacaattttgtgtgtctgatacaggtattggtatcccaaaggataaattagatttaattttccataatttttgtcaagctgatggttcaacaactagaaagtttggtggtacaggtttaggtttatcaatttctaaacaattaattcatcttatgggaggtgaaatttgggttacatctgaatatggtaaaggatctaaattttattttacaattttattatcatctgttaaattatcaattgataaacaattggacattttaagaccttttagatctcaaaaaattttaattgctgcaactgatataatcgaaaatactaattttaatgaattaattaataatttaaaggcattgaaattagatcctcattatattaaagttgatgaaactgctacaacattaaatattaaagatgctgaaagttttgatacaatcattattgattcattacaaaccggttataaattaagattattacctgatattaaatatattccattagttctgctacatccaagattaccacaattaaatatgagagtttgtttagatttgggtattacatcatatggtaatataccgtgttcgataactgatctaggttctgttttattacctgcattagaatctaaagttgtctcacctgatagtgatggaactacatcttataaaattttattagctgaagataatttagttaatcaaaaattagctgtaaagattttagaaaaacatggacatagagttattgttgttgaaaatggtcaagaagcagttgatgcaatacaatcagatacttatgatgttgttttaatggatgttcaaatgcccgtaatgggaggatttgaagcaactaaattaattagagaatgggaaaagaaaaaatatgcagatgctgcaatttgttttaaaactccaattattgcattaacagctcatgcgatgttaggtgatagagaacgttgtttaagagctcaaatggatgaatatttatcaaaacctttaaagccaagtttacttttacaaacaatttccaaatgtattcataatatgaatcaattaagagaaattagtatgttaggtgaaagtagagattctgataatggtaaatttaaacaatatttaaatgaagaatttctaaaacgtggtgcaagtagtgaaagtgtcaatgcatctgcaaaacgacattccagttaattatttttaaactatttatccaattatattatatacctttgtaatcttttgtcttttttctacgtcatgataagtcaaatccagctttactattaatagaatacaacaatttattcctgagtaattctttatctttataatctggaagcttcaataagttaacacacgtaccagctgtaggtaatctttgacaatcctcacctgctctattaataccgaatttcggattaagttcagaaaatcctaataatggttgctttggagatgatgtaacaaattttatgaatttagccttattatcattatcaaactccctgagaacttggaagagatcaataatagtttgactattctctgaataccctccaccatatatgacattcttttctaaatcatcaatatcaatatcttcatcatcaccagaaattaaagtttgtaattcaaatggactgaagattgaaagccaaaatggatcaataacctgaaaaagaccatctataaatgcgtcagaaataactttaaactgtttggatagtctaaaagctgtgactaatcttataaaattcaatttattgctattcgtaaccggaactggtgctggttccaatcctggttctttaggaactaatggtagtaatggaatttcaacatgtcttttttgtaaattcatatcatagaaatcatcatcaattaaaaattctaatgacatttgttcaaatttaaaatcatcagtttgttttaggacataatttaaactattgtacaatgattcatctaaatttttcaattcatcaaatgaatttgaaaaatcatctttagtatcgtcatctccagtggaactacagcataatttgaggaaaaatgagcagaatgaaatatcaagcaatacattatcgtataaacattttcctataatcatacccaaaaatctcatcatattcaaatactccgtatctgagacagcatattcaatttcttcttctgggtgttctctttgatacattattttgaaaaataactcaggatttgggtataacttatgatgtgttccttctttgaaaaactgtaatcccttgttcatctttctattttcaagtgatggaataaatgtagatgtcgttaatgcagtcaaaagctccttggtaagtccaccaccatcaattcctgcttcaacttcaccaaactgattaatgaattgaacagaaaatggtaacttgatatctcgtccttttaaatttccgaaatacttatatgaatcaaataaaacattatctcttgaaactataccttctggtttctcgggataccattcgtttagatcattatccaatttatcgatatttataagttcatggaacattgccggctcttgtctcaaactggaatcatatatggagcatatctcaagatgtaaaaagattctaacattttgttaggaagaagctgtctaacagatgttgggatgtattcgaataattctacggaactagtcttcatggtatcctgcatagctttaattgctccctgcatgggtttcattaatcttaataaattaatcataaaattttcatctagatccataacttgtaataaccagaatgatttatcgcccataaaattcattttcatatccttaagatataatttcttagtcaatagtagaacctttttaaatatcttcatgactattggggcattcagttcagccatcttagaaggttttcttattatatagcatatcagtaacaaaaaatttcaaaaatttagtaaaattgatcaaatcatctttagagattagtattgatgtatagaatgcttcatcagaagataatgaaagcattgacaacataaattcggaaaaaacttctagagaaattaaccaatggcaattatcatcatcttcaaatgatgatttattattctcaatcaaaatactattcaaacttttaaactcttcaaactctgataaatatttaaaactatccttcataatttcagaattttgctcagaaatgatccaatttaaatcagtaagagatttcaatacatttgcttctttcctttcaaatgtgcttgcaaatattaacaaaaaacaaacatgatttattaaaatgggagtttctttacttttaaacttagtccaatcataaatctttttatattgataaaaaaatttaaagctttcaaatacctgattgctaattattatttcatcttctgcttctttgacccataaatcttgtgtgttagacactttagtcgtccgattacttacacttaaggtataacgaaatgtaatagcataagtgactgcgattgtttgaatataataatttctttcatactttgagaacctttgaacggcatctgctgcaaagcataataggggaattgatgtagttagattttcagacaaaaagtaatagctgatttggaaaaaaaacttttgaaattcatattctaattttttgttgattgcatcttcggtaatatttcttttaggtgcatacacaccatcttcggttttaaatagtatattaaataacaaattggtttcaaaattatctgctcccttcaaaataaaagtcaaaaacctgaatatcagattcctcaaaatataagtaaaaaagaacgtctagaaactttttattatttatctttctattcccgaaaaacaaagaggaaattacatccaaaatgtcattttttatttcatgaaactcagcagtaaaataaacttcatccttcgtataaacaaacctttcaattaattctaaaaatcctgaaatcaatgcctctctagctccaatctcatcatcttcaaaaacgtaaacgcctggcaaattatacatgaaatcttcaatttccgccagtgaacatcttttaatgaattcgggaaagaaaaatttgaattgataagtatttttcttatcccattctttggccatttgaagtttagtatcccttaaatcaatataacgacgaatggcagattgtataaccactgcagcattataagtttttctctcagcttctcttttttctctctccagttttgcctttagtaaaaaattattcttatcacccaaagatctgttccctaaattaacgttctttcgtttcgttgaacccgtaaaattgaaactcatacctttgccaaaaagaagaatcgggaggtaaatttgataagattcaaattcaagagatgcaacagaattaagtgaatcatgttgggtggcgcagtgtttttgcttattgtggcgcatgaaacaccaagttaaaatttttactgtgtgcaacgcgtcctcattttagaaatgacgaaatttaatgattttgaaatttttattaccaattgattgatttgtttagcttggtttatttttatatatacgaacaattagacaatgactgttaaaagagagggaggagaagaattggaaattgatatctatgagttagaaaataaaagaagatgtctgagtaataatgaagtgacaaaggaaggatttgtcattccaattcataataatgaagttaatactgaaacaattgataaaaagcttaacacacaggaatctcaagtagaatcatcaagttttgaaaaagaacttcttactatgactaatgatacaaaagaatttagaaatccagtacaaatttggggtagacctgaattaccaaaaaatttcgatattgcaacacatgatattaatttccaacaattagatgcagaggaatcaagtttaatatcaggtggtaaggaggaaggttgtgctagattttttggtataactgataatgggaattctgttctttgtaatgttaccggatttagtcattatttttatgtccctgctccaaaaggtttcccaactgaatttagtgaatttactaaatatttaagaggttattatcctaatatgattgaagatgttgaaattgaaatgaaattaagtatttgggaatatcatggtgatcaaaaattaccttttttaaaaattattgtaacacatccaaaacatgcaggtaaaattcgtacaggatttgaaagaggtgaagttcaatttcgtgaactatttaatccaagtggtacagttacttttgataatttacaatatttattaagattgatggttgattgtaaaattactggtatgagctggttatcatgtccagctggtaaatatcaaatggttgaagaaagtagaaaagtttctgtttgtcaactggaaataaatataaattatgatgatttaataagtcataaacctgaaggtaaatacttagcaatggcaccattaagagttttatcctttgatattgaatgtgccggtaggaaaggtattttccccgaacctgaacatgatagtgttattcaaattgcaaatgtagtctcaaatgttggtgaaagtattccatttgttcgtaatgttttcactgttaaaagttgttctccaattgctggatctgaagttttcagttatgaaactgaggaagaaatgctgatgaaatggaaagaatttatggttaaagttgatgctgatgttattattggttataatattataaattttgatttaccatatttaattaatagggctagaacattaaaattagagaatttcccttattttggtagattattcaatacaaaacaagaaattaaagattcaattttcagttcaagagcatatggtacaagagaatctaaagttattaatactgaaggtagaatgcaattagatttattacaatttattcaaagagaatttaaattaagatcatatacattaaatgctgtttcatcccatttcttaggagaacaaaaagaagatgttccacatacaattattacagatttacagaatggtgatagtgaaacgcgtagaagattggccgtttattgtttaaaggatgcatttttaccattgagattgatggaaaaattaatgtgtttagttaattatactgaaatggcaagagttacaggtgttccattttcatttttattaacaagaggacaacaaattaaagttatttcacaattatttagaaaatgtttggatttagatattgttatacctaatatgaaaagtgaaaatgttaatgaagaatatgagggtgcaacagttattgaaccagttagaggatattatgatgttccaattgctacattagattttgcatcattatatccatcaattatgatggcacataatttatgttatactacattattacgtaaaccaacaattgatagacttggattaaaggaaggtgatgattatatcaagacaccaaatggagattattttgctaaagatcatttacgtaaaggtattttaccaactattttaaaggaacttttatcagctagaaagcaagcaaagaatgatttaaagaaagaaactgatccatttaagaaacaagttttaaatggtagacaattagcattaaagatatcagcaaattcggtttatggttttacaggtgcaactattggtaaattaccatgtttagcaatttcatctagtgttacagcatttggtagagaaatgattgaagcaactaaaaatgcagttgaagaaaaatatagtattaagaatggatttaaatatgattctaaagttatttatggtgatacagattctgttatggttagatttggatttgaagatttagaatcaagtatgaagattggtgaagaggcagcagcatatgtttctgaattatttaaagatccaattaaattagagtttgaaaaagtttatttcccatatttattgattaataagaagagatatgctggtttatattggacaaatcctaataaatttgataagatggatactaaaggtattgaaacagttagaagagataattgtaaacttgttcaaaatgttattacaagagttttagaattaattttagaggatagaaatgttgaagaagcagaagaatttgttaagaagacaattgctaatttattacaaaataaagttgatttatcacaattagttatttcaaaacaattaagtagacaagattatgcaaatagacaaccacatgttgaattagctgaaagaatgagaaaaagagatccaggtagtgcaccaaatgttggtgatcgtgttgcatatgttataattaagacacagggtaataagaattatgaaaaatctgaggatccattatatgttttagagaattcattaccaattgatacaaaatattatcttgataatcaattaagtaaaccattaacaagaatttttgaaccaattttaggagagaaaagaacacgtgatttattacaaggatctcatacacgtattattagtagtaatggtggtaataataatagtaatagtagtaataataataataatggaaagggaggtttattaatgagatttgctaaaaaatctaatacatgtcgtggatgtcgtagtgcaattccagcaactgagatgttatgtaatcattgtaaggctagaagtggagaattatatggtgaagcagttgcaaagatggcagttttagaatcaagatttgctagattatggacagaatgtcaaagatgtcaaggttcagttcatcaagaggttctctgtggtaatagagattgtcctatattttacatgcgccaaaaatgtcgtaaggacgtggcgcagcagggagaagaggtggctcagtgggataaaataaaatggtgaagtatttgaaaattcagttacgtaatcagcaaatcgggtgtaaataatttcaaatttttgagtgaaaaaaaccattggcgaaaaaaattaaaagctcgggaacggagaagaaattattaatagtgtgaaaaagaaaaccgttatgagagactaattaataatatttttcaagcgttcggagactaacggagactagtggtttatatcagtctgactaattcctaaattctattttatgttctatgtttattctattttattttaagtttattctatgtttattttcttttatagcatcttataattctatattattcttcatttcacaatactacccatccacttatgcaaaaatgatttcttcttgcatgcaaacgtataattctggaaaaattgctcaaacttatctcctcgcttcaaaggtaaaaacaaaattaaatcaagaagcagttaaaaataatgttgatctgcatcgtttagtatgtcaagcaaatttacttgataatttaatagaatctttaaatcatttagagaagagtttacaaaataattttatttctccaaattctccattctcgtatgaaacaattaattcaaatacttatccccttttaaatagtctatccctaaatatgaataccctcaccttgatttcagaaaatgaaatagacgataaaaatgatgataatgataacgataatgataatgataatgatattgacattcaagtagatcagatacatctgcaaaatgaaaatccttcaggtgtatattactcatctgaagaatccgatgattcattttcagacgatgatgatgatgatgatgatgatgatgatgacaatttcgattcagatgatgaatatatcaataactctccatctgctttattctcaaatgatctttgttcaattgccttacagagactgaatattcaaagtatagaatgtgattctgattctgattctgataatgattctgataatgattcttaccttgatgatgaaacaaatttaaatgctgagtacaatgatcctgataacaataataacactcaaactaatattaccaacacatttgttgacgaatgtgattgtcctttaactagaatgaagtctcagtacatagatcataatcattatgatgaagaaactgaacttcctcttctgtcaaattgcccatctgtatcatccttggaagaatttcaggtagatgattcaacatttactttgactactcttcctaaatcaaaaactactaatttccatattcaaaataatgatgaggatgtttctgaaattttatcattctaatatatcaatatatgttagtaaaggtggctttactgatgtataaattgataccatatactgcttttaattttataatgacctttacgatcaaaaaaaacacttaacgtttaatgtttatatgaattgattttaattacttctatttttacttttatgatatttacatttatttttactttttcattgtttttagttttttacctatgttttcaagctgttgttattttgtaattaataactgaatataatttttacgacataaattttaaagaatttccgcaaaacactttgtgttttttaaaccttccgcttccaaaataagaaaaattaacaatgtgaacaaatcaaataaattaaacttttttaagcattaaatgtacacatctaactgttggatattttttaaaacagctttacaagtcttaataaataagtagtcaacaaatttggccttttttgaaagtcacgtgaccattttacatgctttttatttattactataaaaataaaagtagcaataatgactggatggccaagttggttaaggcgtgcgactgttaatcgcaagatcgtgagttcaatcctcactctggtcgtatttttttggagtttattttctttaattctttaatgtcttctaattctgacaaactatcaacctagaataacatacaatcactataatcttttttaatttacaaattatactataatatacactattaaacaaggtaactgaataaaacagcctttctttttgtaacactatccttaccatgtaattcgagaagcggtttattatcaggatcaactttaagtaattcatcatccttttcagtccaaaatcctgagacattattcattattaattcaccagttttcaaataatgaatgattgcttgaataaatgtacccaacataccacatgaacaatcaaaccaataatttaaccaaagcattgaaatacctgtttgatcactaatatctttaaataattcatatggtgtactattatctccaaaatttctaaaacattcacgaatactttcaatcattgatggtaaatcaatactatcacgatgttttaatggttctggatcaatatcaattaattgtctaaagtccattaatccatcatctgcctttgcattgatcatatcaacatcatcatcttgatttccattctcattattattttgatcatcaccttcctcgtttactggttctatatgttcatttgcacttaatattgggttactaccagttgattcagataaattatcaatttttctattttcatccaatgaaatattgtattgtttcatttcatcaactgttgcagaaacaaataaattagcatcctcatcaattatatcattaccagttttgtcaattgttcttttattctttgatggctttgcttcgctttctttgatgcttcttaagttattatttattggttttgatccaattaaattatcagttttagtactagtagttttagtattactagcatcatttttactcttcaaagcctttttgtcattaatctttctttgagtagttgaaatattagctagtgtactcaatgctgggttggaatttgcattcttattctcatataacgaagattctaaagatctagttggatcaatcttatcattagtatttggcacaaattcttcggcaatcttagatttggaatcaacatcatcaattttacttctatttttggttttgccatctccattactaggcttaacacgtttaacatttttctcttcagtgttactattttgacgtttactaatattttcattttcaaaaacatcaactttataatctcttctatcagctcttgaactcatattcttcattggttcagctggtatatttttactttgacaatcttcatagtatgtaatgtaacgttttaaaccaaattttgcagcaaattttctgtatctatctctccatgacattgccgaatgtcttggattagattcatgtagcttttgaaaaacgtattcaggaatttgtgaaacttcaactctttttttagatgtaatcgtaagttcaccgttcttatacgcccagatatgtttacaaagtgcataatcttcatcagaggtatattgtgatttgattaatgatggtatttctgttattttcataacttcattagtttctgggtttattaatggttcgcctgtctctggatcaagtttataaacataagttaatttaggtgctaatattttacgatatctatatctgattgaattccctgtatgttccgataatggtggtaattgtgctattcttgcaaaaaatgtatgagtagatcttaaatgaggattccttctgactaaatctaaaatatattcatcttcttcttctgtgaacttgtttgattttcttttagataatgaatgtgtattattgattttgatatcagtaattgattgtgttacaccaccatgagagatatcattatgttgataacctgaagatcttgaaatggggaaattaccaatactaatttttaattcttgatttgcttttgacttggcactaggtagtttgtattttttcatattaagacttgcttgttttgtgaacgtatcataaatatacgaataagtgtattgtgttattgaatcaccaatactatcatttttagatggaaccaatgttattgaatcaggattagatgtggtagatatacttccaccacatgctataatcatctctataacagtttgattttcttcaaaatcaattggtaaataaaatgacttatctttgagtaattgattcattttattttgtttattaactcttttgttagatggttccttcaattccgttttagattttgaatccatatctgtactgtctaatgaagttatattactattcggtaaactttctccagttatggtcgtactcatactagcatgtttaacaatatctgccataacgtcagcatcgacttcaacatcatctacatcaacaccacttacattaatatcaacatctatatgtttagcaatatcaccgatatcatcatcatccaccacatcaccatgaacattttcaatttgtgtatgtgattctaaaccctgtgtattatcatcatcattatcattattttcattattatctgcatgactcaatgtagctcgtgcaaaggatgcaacagcagctgcagcaatgtcaacattatctaccgttgaatgaatattttgcatatcaatatttcccaattttcttaattcatcatcaatatttgttgcatcaagtatagttttgtgggtatcattatcatgattattattagaaccactgttaattccatcgattatatgagaattttcaacattattattatcattagaggatattacattcttgtctttagctcctgcgtcgaggcgtatatcattggaagttgaatgtaatgtaacaccatctaaattatcaccctgattttcattatgactatttttaacaacaaaattttcattaatactatcatttaattgatcctgtaattgagaatgaatttgatgttcaaattgattaattgtttcatgcaatgaatcagattcattttcagtcttactgttgtttaattttcttttatttttatttccctttatagtcgatttagcaatacttacaattccattagtgtctaaccttttgcctatattatcgttgtcattattactgttttcattcttataaacagaatgctccaactcacgtaaatccttgttcacctcttcctctgtcattaatactttcggagtttcctatctcaggattgtttgatccggaatttaaagctagtggtgttgtgatgtagaggaaaaaaacataaaacacaggtacaccgccattagagactccaactctgaagcacgaaaaattttaagttgataaaatttgggaaaaggaataaaaattttatttttaatcatgtgcgtcttttgattctgtattattattttattacgtaattgttttcattattattagtgatttaatagtatgtttagtacataacaactgtttatatgaatgtaagaatgtaaaaagtaagataaatatttttccaccagaatcatgtatcattaacttacaaataaaaaaatataaataaaaggggaaaatgctcaaaaaagtggaaaagatgttaaatttttctttttaaccgaatggtgtctccgaagtccgagtttcttccttttctatcacaatttctttagatagaagagttctcaattcatcactgatcggtttcacaggttcaccagcttgcttagaattaaatgacgtccctgcagaactacgatcaataagttcaaccatttgtttgaatttcaaaaacagtaattctgatctagttaataaatcttgaacatctaacttcccactcaagtcattaatatatcttaatattccatcaaatcccttgagagtcttcataattattttactatgcttttgcaatattgctaatgcaaaaaacaaaataaattgggaagaataataatccgtccacataatctcccataaatccatagtttccagaaaacttaattctcttttaaaccaaacaagtaacattctaaaaaagaaaaataaattactggaatcacatttctctaaatgaacatataaatctggtaacataaattgtactaattctgttagtgtaaccatttgtgctttcataccacttaaattccttacaaaatttctctccattctttccataaagttactaaatgcccaaaatgtaattgcttcatcctttaaaacataatatagaggagctaacaaatcacacattccttgaacatatcctaagttataatttaattcattataagagaacaaaatatctctcatcactagcagatttttattatggaaaagtgtttcattgccaaactcatcctcttcattccaatatgaaccatcataatcatcatcaaaatcctcatcattatcatcccccttacttgattgaaaaaaatcaacatctctatcagttctctttaaatccttgtaaattctaactttttggtctttccaaaatgcatcattttcctgtttcgttagatcagccttccaactattcttatactcaatataattattttctaatgatttctttaattgttctctttcagaggctgttgtatcccatgggaaaactcctaataggaacaaccatgcatcttttctaatatcttcttcaagaccagaatggaatatttgttcaattatctcatgaatcgtaaattgtaaactaccatttgaatcgaaaaacttattccaatcttccttattcattttaccccttcttgcagcttttgaaacttccaatggtgttaattcaatgaatttatccccaagttcaacacttattaattctttataatattcgttaccaataatcatttttctatttttttctgcctcttcttgaacacttaatgcccatttagctaaataaacacttgcactatcaaaatcatccgttatttttttaacttcaggtctttcaacatatttttgtaaagattgtggtaaaatcttattatcaattgcattgtttatttgttttttagcaaatccagttatagatgctaaacctgtcaataaattccattttgcagttgtcaaaacttgattaacttcagcattaaaatcatatgatttatcgtctttattttgatcatcgtttaaaatattcggaacaaaattcattgcatcttcctgtgtacaattgattaagaacatccccgtttctaaagtactttctgtcaatgtagcataattcttaagacaacttataaatctatcgccaccccagtataatgaattaccaccaatttgattttcagaatatggttcaaaattttgattcttaagcttctgttcacgttttgtacctaatgattcatcatcatggaaaaataatgcaggtaatctatcattttcttgttttggatgtaaaataatcgaaccttcccataaacttgtcttcttcggtctgacttgaatagtatataattgattaatcacagcaccaaatgcatatgaagaaattgacgatatacgaggtctatcaataaatctaataatttgtggaaagtttttaccatttatatcatttttattatttgaataaaaatcatttttttcaccatctaagccgtataaatcaaaatagtcaagcgttgttttatcttctatagataaatctgattcaggaataaatgaaatgatcaattcatcatttctggaatcagggaatggtttgacgatagttaaataacctggtatattatcatttttatttgatgtaacatggatataaacttttgactttgcatataatacttgtcccttacccggagggaaatttttaggagccttcatttagacgattgatgtcagttgttttgatggaaaaatctaacgaaaaggtaccaatcaattataaaaataattctctagtattaaattaaatcattgggtcatttaacaaaatttattatgttgcgatgtgaaagggggctcaacagctagaagcccccttaattttaaaaactattaaaaaaaatgttctatttatacaatttatatacatgtgtaaagtctagttggttggagtaaataacttgtagcaattactgctatcacgatctatacttacatcattacgctcggtatagaaagatggatttctaccccttactgatataccattagttttcaaaacttttaaaacttgagtgaatggtaattttcttttattattgacttcttcaacattatcctctttcagttccacaactaaagctatttgaatatagtaataatcttttgcaatgaatttaccattattaggggttgcctttttaaattgaaatcttcttaatttaatgttttttctacctttaaaagttccaaggttcatcaattcattatccattataatataattttcatttttttcaggaactaaattattgaaaattgtcaattcaacatcagaatttgaaaaatttgatttacaactcagtgacaattgaatattttcaatttcataatttctattattcatataaagatattttggttcttcattaaaataaaggaatattaataaactattataatttctacgataacatgcaatgggcatgttatcattcataccatcattttgtaaataagtttcattgataaaaaatttaccatccaatgaacttaaaaactccgttgatacctctctatggaatttatctaaaatgttaatatctttggagttatcctcaaaaacaattaaatcaagggctctttccttgtatgttgccaaaggatcttcatcaggcttgatttgttgttgttgctgctgctgctcttgttgttgttgttgttgttgttgttgggaatcataccgtttttgttgattgaattccctttgaagcaattgttgattcttttgttggtgccgttcatgatattcctgttgatcatcctgatcatggtaattatgataatcattataacctccttgatttagatcttgatttctttcatcagattcatcttttaaatcattttcacccttcactattttattaacttgattttgttctttctttatattatcatcagatttatataaatgatcactaaattcatcctctatcagaatgctgacttccagaaatatttaaccttgaatcatcataattcatctgtccatcattttgtttttgataataatggtcactactatgattactattcaatgattcactttgttgcatttgaaaactggaattatttacagaattatatgaatgaatacttgccttttcactaaccagagtgtgaatgggattttgataaggtggttggtattgtggtgaaattaattgaggtgattttacacgattggggaaatttctttgagtggaataaaattgagacatatttgatggggtattattattattattattattattcgaaagttgataagattgttgaaattgtgaattcatgggagaattacctgccattgcttgatattgagggtatgattgagcagcggaaggtgaaggtgattgtatattattttgattatttgaaatataatacattggtctattgtaaatttgagagtgcatcattgaggagtaatataaattctgattgtcataaacattattattattattattattattattattagtgctattattattgctattattattgctattattattttctgaactattaacaatactcattgattgacttaaataaccattattatttgctaaatgagctgaatttaaacctaaatgagacaatgaaacattagattgttgatttaaagattgattttgatatttccaattatttggattaccattttttaaatcttttattcgtaaagtaacactatcattaaaggaattagttgattcaacttcatcaaattgtttatgactgaaaatttcatcagtattttgttgtttctcaactgcatgtaacattctatacatatcaagtctaaaacggacatattcttcatgagctggtacttcaccatcaatatactccgagatgtctacctcttgcaagaaattttgctcaaaagcctttgcgtactcgctgtgagagaccatgtgcaatcaaaggaaggaatagaagaagagggaataaatggaagcataagaaaatagcatgatataataattttttgagataagaagtacagtaattaaataaattaaatattaatataatagaatgtaaccaacagttttctaagagttttccactgcaggacgtgggccctttccggggtagtaacggacctaattttagcgccatttaatgttacatttttcttatttttcttattttctcttattttctcaacattttctattcgggaaaacacgtaaacgttttattattattccatgggaggtttgttattgttattgttttctattttgatcatttggaggttttgactttaaatgtttgatcttatcatatatatttatattatacactactatctaactaaatggttgaatcgattttcgattctttaaatgaaaagcaatcacaagctctacgcgttccacatgatacagtattacaagtagttgctggtcctggtactggtaagactaaattattagtttcaagagttgcatatcttttattagtatgtaaattacctccatcgggcattatagtgacaactttcactaaaaaggctgcaaatgaaatgaaagagagattagagaaaatgctcatagatcatccggaaattgatttaaatagattacaaattggtactttccattcaatttgttttaaatatttgaaattttatggtaaatatattggtttaagtaaaaatgttacaattgcagattcaaaaggatcaaagagatttaattacaacagcaattaaaaatttagatttagataatgtaaaggataaaaggaacactattaatgaagttaaaaattttattttaaagcaaaaagcttcaggtttattccctgataatgttgttacaactactgatacagaagctcaatatttacaaatttattatgaatatcaaagattattggcaaaacattcagcattagattttgatgatgttttactttcatactgataaattacttcaagtacgacctgaatgtgtctcatatgtcaaacatattctaattgatgaattccaagacacaaatgatattcaattcaatctaatgtacaaattatctaaatactgtagtaatagtataactatagttggagatgcagatcaaagtatttatggatttagaaatgcaacctatgctaattttaaaaaagttgaaacaattgcattacaaagaaatcaaagatttgttaaaatttctctagatcaaaattatagatcaactaatgcaatcttacaattagctgaaaacttaatgaggcatcaaactactagagaaaataaaaatttagtttctaataataatctagatacccctgttcattatatcaaacatcgtgatgaatatgatgaatcatgttttattgcaaacagaatccataaaattgttaatgatcccgcaaataaatacacatataatgatgtggcagttattgttagagtatcaagaacatttttggcaattgaaatcgatttaactagaagaggaattccttatagaattgtcaaaggtttatcattttgggaactaaaagaaatttcaatggcagttgattgtttaagaattgttgcattaaatgactggcttgctttcaaacgtgttattgaatggttttgtgctggttgtggagcaaagttgatattgaaaattgaagcttctgtatattcccctgaaattaacaaaaatgataatgtttttgaaattgtcaaatcatatgcagatggtaaattaccaggtgcaacagctaaggcaaaacaatccttaaaaaatttaatttcagttattgaaaattgtaaattggagattgaacaactcacaactttacaatgctttgaatacattatgacaaaatttgatcttattgataacgtactgaaaaagaagacaagtaaaaaggatgaagctgaaatattgtcagatataaatgctaatataaaagaattaaagaatcaaatagttaactatgatccagaaaaagacgatctattacagaaggcacatgaaaagacttttatagaacaagaaatgttgaatgcaggtactgacaacaaagaatttgaaaacattaatgatacaattgtgagtgaagattcttcaaaactcaaatttattcaacaatttttggaacatgtgcatctagcagaaacagtatcttcagatgatgaaaatgataagggtaaagtaacattaacgacaattcatggctccaagggtcttgaatggtcagctgtttttattccatcaattgttaataatatattaccttctaaatttgctcttgatcaacatgattattttgcaccagatagtttaatagatgaggagagaagatgtttttatgttgcgatcactagagcaaaggaacagttattcttaagtacatacgatgttgttatgaatgatattatggttgcgaaatcatcttgttttcttgacgaaattcccaagtcatgttataaaattatcagtagttttgtcacccctagtccaacgtatggactaggtgggatgtacgtggttcaacctaaaacttttgttgttaaaaagattgttcgacatcattctactactacaaacataccaccgacagttttaggttcaacaggaatgacttacaatccggtaactggtgctgttgttagaccagtcaataataatcaaccaacttcaacatacattaagaaagaagaaaatacagatgaccagaagaagtccaaatttgttaagtacttctaatcaaataataaacaacactcttaatcaaattccaacttttactaaagtaaagcgagagggcaagatttataaaccgactgttaaaacaacagattcaatacaaaatgcaacaacgttagctgtcaataatatgaaaaaacctacaaagaagaggttaggaatgggtagaccaatatctcagtatttaactaaaaagaagttatgataaaattttcattttatataccattctaagtctatttttctgaaactaacaaatacctatatatcttttcgagtaaactgtttataaatggaatggcaccgttcacctcttccagttaatagtacaataacaaagatagtattgcaaagtattacgtaatgtgttgagatttgattttgaaatttatcctaaacgggtgcatgaaaattttcttaacaattttttttatctatcactaaattaatgttaaaaatatttttttatttatcacttattcaagttataatcttgaatatagagttagaaaacaaatatttactttgctatataaaatatgtctactttagtaccaccacaatcgaaaagacaaaaaagagatgcacaacaaccacgtgaagttgatataattccaagtgatttaccaaatgttttagtcaaatttcaagcatctgatacaggagaatcagttggcggttcaattagagttcctggtgcaattactgaaaagcaattagaagaattacttaatgaattaaatggtacagctgatgatcctattccatacactttctctttagaaactgaaaaagatttagttgatattaaggataatctttatgcatcagttcttaaacctggattgaaaacaacagaagactttttaacacttgtatatacaccaagagcagttttcaaagttaaacctgttactagagcttctgcaacaattacaggtcacggatcaacaattttagcagcacaatttgcaccaaatacaagtgataaattagttaccggagctggtgattcgactgctagaatttgggataccaatactcaaactattcaaaaaactttaaatggtcatagtaattgggttttatgtgttcaatggtcaccaagaggtgatgtaattgcaactggttcaatggattcaaatatcaaaatatgggatgctaagactagtgattgtttaggtaccttatcaggtcatggtaaatggattagttatttatcatgggaaccaattcatttagttgaaaagggtcacaagccaagattagtttcaggatcaaaagatggttcaattaaaatttgggatactggttcaatgcgttgtttaatgactatgtcaggtcattcatcagcagtttcatgcgtcaaatggggtggtttaggattgatttattctgcatctcacgataaaactatcagagtttgggactctaaggatggtaaatgtttacaaattttaaaatctcatgcacattgggttaatcatttagcattatcaactgatcatgtattgagacttggtgcatttgattataagggtgaaactccaaagaatgaagaagaagagaaggaaagagctttaaagaattttgaaaaagttagtaaaattggtggtaaattaactgaaagacttgtaactgcaagtgatgattttacaatgtttttatgggaacctagtaagtcaaataaaccattatgtagaatgacaggtcatcaaaaattagttaatcacgtctcattttctccagatggtagatatgttacatctgcatcatttgataattcaattaaattatgggatggtagagatggtaaatttatctcaacttttagaggtcatgttgcaccagtttatcaaacttcatggtcatcagattgtagattattagtcagttgttctaaggatactacattgaaagtttgggatgttaaaacgaggaaattaatgtctgatttaccaggccatttagatgaaatttatacggttgactggagtgttgatggtaaaagagttgcaagtggtggtaaagataaatccgttcgtatatggacacactgaacttttgattatatattctatattatgtttcagtaaccttatctattttatcaatctattatatagtgcatatattgattgcatcgattatgatcctctattctttaataatctggggaaattggtattacgtaaacatccacatttttgaatttgatgacttgcgttacaactgacaccaaaggttattaaattcgaagatgctcttcttcagcagaacagtcttctagaaatcaatgatgacatcaactaacgtattcaaatctcccaaagtctctcttatagttgcagcacttttaccagaattaggtattggtaacaaaggtaaattaccatgggcaattaaacaagaaatgaaatatttccgtaaaattacctctaaaactgcccatgaagagaagagaaatgcagttattatgggacgtaaaacttatttatcaattcctaaaagatttagaccattaaaggacagacttaatattgtactttcaagagatgttgaaaaattaaagcttgaaattggtgctgaactaattgataatgaagataatttacgtttatcagattcattaagttcagttattgaaagtttacaagatagtgataaaattgaagaaatttttataatcggaggagctgaagtttataatcaattgatcaaggatcaccatgatttaattgatgctatctatcttactgaaattacttataaggataaattagagatggattcatatttcaatttagataaggatttatggattaagtgtgataatgaaaagttaaagaaagttcttgaatccaaaggattgcatgaagaatttgaagtcactggtaatattgaggatgaattcaagtttgattttaccttatgggaaaagaggattgtataagtgtagataatataaattaaatcaaaagtatcagatataaagtatcctaattaaagtataattagccttagaaattagcaaattagccccatcatattcacgtgatacatacgagggcataaatttataaaacacacccacaccacatacaaaataaagcgacgcaaaaaacattgctgacataatacacagtgactgttatttatataatattgcttaatttgcagggaggaaaaaatcgaaaaaatcgtgaaaattcgctctcactcatagtggcaaagtgcagagcctcccacagcgctgggggagtgagggaaaacttagagacgcacctggtgaaaaaaaaatttgtatgatattgtgagtttcaactatacttgtattctattgtaaggattatttgttaatcttcttgaaattctttcatttaccagattatttagatacatcaaaaatggctgaatctcacagatgtaagtaccaacacgaatatcaaacgaatggattataaacaagttatatcattttttaatccaatatttactatccaacaaaaaagttagactaaatggacatatgaatgataaagtagttttgaaatataatatgagcttcagaattaggaaaatttgaatataatgttaattggttttaacatttgaagaaattggaataatctcttatctatattggatttgagtttctaagtagtgaaacaataataacagaattggcggtatcgttagtttcatcattattatcactcatgtcatatatacttctttattactattatcattagatatgtacattaaaatctatctatcaaacctttcttggaaccaaaatactaacatcaaatcaaattttatttaaaatttttattattattacagtgtacgtcaaaggaaagcacgtctcataccaaagatccaagaacgttaccaacccaaacacttctttaattaagattgaaggtgttgctaacaaggatgaagcaaaattctacttaggtaaaagaattgcatatgtctacaaagcatctaaagaagtcagaggtactaaaatcagatgtatgtggggtaaggttaccagagttcacggtaacaatggtttagtcagagctcaattcaagaacaacttaccagcaaaaactttcggtgcttccgtcagaattatgctttacccatccaacatctaattttaaactcttttataaataaatcattataaaataatttataactcttaaaatgatatataagaactatatctttcgtttagttaattaatttatctgtattttgtacattattattatcaatatagcactttattttacgtacaatattataataatacttcctattatagccatatattacgtaatgaaaactgaaaatcgacgcgtcgtgtactggcacaaaattttaattggcagaaggaggggaaaaatgagaaaagtgaggaagagaaacatgaataatgtgattataagacacagttattaataaaggaagtctttaaaatattctctttaacaacaatagctgtttgcttattcaattaataaatagctaatatgattccttgggagggtttaattccatatggacttattttaagtttctttgcacttgcaggtggtggtatgaatgccattacaatttcatccttaaccagaaatgctcaaggtccaaatcatgaatcaaattattcagttgaaacagaagataaagaatgggttagaccaagaactaagactgatcaatgggataaatatttagcagttcgtgatttaagattaacaggtaatttcagaggtcaaaaggctgatcctgaagctgaggaagctttcgaaactaattcagttgttttcgcttcaaatactttaaaaccttgggttttaagaaaacatattattatgaagaactcaccatccaagtggatgaagaaatatcactctgaaagagaacaacaatgggaagctgttaaggaaaattatttgagaagtatgcaaaaatagatcttttaatacaattaaataaaaataaccccatcttatttattttatatcatacattatattaattaataaaatactattattcttcgattcgaaaaaaaaacaattatttttatagaaattccctgaagtaaacaaaaacaaaataaatacacaaaacaaaatagaataaaataaagtaacataaaaaacattaaaaaaatgcatggtaaaaatacaataattcatgaacaatgtacaagcatcattaacactaaacttctttagatacgcatactacgacgtttgaaaaagtccatcactttacgtgcagttgatgtagtttccctttccttatcttgaatattaacaccagaaaccttacgttcatttttatttgaaggttctaatggttgtaagttatttcttcttgaacttttcggtttaactattgttggaggtgtgactttcctttgtctatcatgtgaaatttcattgacaacaattggtctctcatcttcatgtattgtaggtttgtaattactagttgatgatgttggccctggaatattttgataaaatgtaagtaaactaaatcttttatatttaggatcaacacttgtagcagctgtagaatatgattgtgtgggaagttttatggtttcatctttggttttatttccaattggatgttctctaatgttcaaagtttcatttatagcatcatttgatttattaatatgattaacagtttcattgttatcattatcttcatgatcagttgaaacatcattacctaatgtcacatcaacgtcttcatttattatttcttcctttaaattactcgtagttattggacttgaacttgacataatagacaatgattctaatgagttggatattacatcaccagctttattttcttttattgatgaaattaatgattcactagttgatgaataattactactgaatttaggaatattctttaatgaattttcagaataattactctttgcaaggaaagataaatctgctggcgtaaaactacttccaaatactggcgagtttaatgaatttggtgtataagatggatgatatgatgttggacgaggtttgttggttcttgatgatggtaacttcgttgttgaaacctcttttggtgatgaactattactaaagtttggaggtgccaatggtgctaatacatgtggtttaggatgttccggactttcctttatagtttcaaagttcttatttttatctgaagttaataatggtataaatgatattggtcgttgtgttgattttgcctttataggagtagcaagtaattcattagaactattactataacgtcttttgatttcataatctgcatcaacaactgcttgtaaaactaaacttgcagttgagccagatcttgaatgtcttgttactatttcattattagaatcattatttgcctctattttcattgtgtgaatagcagttgggattgtgctgtttgaattgttattgagtctcattggtgaactaacaggtgaagtctcagcagaaggaattgctgtagctattgatgtttgaggagctgcaggattggaatataatgaagcattcacattttgagttgaataagatctgacactctgtttatttaatattagggaagcagaagttggattttccattaatgacattcttctattgaccttatcctgttgtgttaaaattctggaagatctatagtttttatcccattcaattggagagacggataaaaatggtgcatgaggagctaaccatcgatgtgcaatcacattatttaatgaaatccttttgtttggatttgatactaaaatttttcttagtaaatctcttggggttggctgaataaattccgggaaagttaatggagtatgagtaatataatgataaagtcttgaaatatttgtaccatctggattttctgggtcatcatcaaaaggtaaataaccagctaacatcgcatataaaataataccacatgaccaaacatcaacttttttaccttcatatggttcatttgaaacaactaattctggagcggcataacatggggatccacaacttgttttcatcagatcatttggtttgtttgtgaatgaattaacaaatccaaaatctgttattataatgtttttgtgtttgtctaataacaaattttctaattttaaatctctatgaactattcctttggaatgcatataattaacacctgatacaagttgagcaaataatctacaagcaaaagaatctttcaaatatctatgttcaagaatataatcaaataattcaccgcctgatgcatattctaagactataccaatatatttatcattttgtaaaacttctactaatctgacaatatttgggtgccttagtttctttaaagcagttatttcacggtatattttaccttctttctctgaaccagttggaattgaatctctttttataagttttatagcagcttgggatggtagttttccatcttttctccaacctaatttaacttttccaaactcaccttctcctagagtagaacctagaacataatttccaaatcgtacttctctaggaattcttcttttacctggaatttcaggaatgacagcttttgttgacattgcgtttgttaatatttagttgatgagatgatgtttatttcaaaataaagatgtattgaatatttagaaactgattttaaaaggagtgaatagttgttgttgttgttgttgttgggtattgagtaatgagagctgttttttttaagttactttctcaatttgagtgttttttttctagagagagttctatatagcaatataaacgatatatcaattagttatgttgaatacagatttcaaaaggagattattgcttgtgttttgtgatgtgtaacacagaaaggttataaaatcaataaaaaattagttagtaaacgtcaacatcgaaatgtcaacaaaccaaacgcgcgcatttgtttacgtctttccgaaataggaaggcggcgcgtcttttagtatggtgaaaaatcagtcaattttcaatttaactttaactaaatatttttattttttagctttacagtttataataatataaactttaagtttaactgttaaacggtttgttgaaagcattcagtaacctattcaccttggattctcccaatccttcaacctgttgcaactgtgatccttctaatgaaacaatgtttttgaatgttttatattgagccatcaatttttgtgcatctctactactaacacctctaactccagagacacattcaactaatctctccaaaaatttcccatgttgaccaataatttcatcatctgatacacgttttcctcgtataatagcttgactcgcctctccctgaacatgctttaagtttaataaatgtgtagcacattcttcattagaccaccctaataataatgtcaattcagatgtaagacatagtttgttaagttctcgaattgaatcatgaaaatcttccacatcaacgtaaactaaaagtactcttagtgtatcaggtaaattatatgtgattttttgaaatcgcctctccacatactctggatgaagtttatgatactttaaagaaagaaagagtacaacacatttagaactgatgacgtaatccacatccttaattttactattcatttcgtagctgatatgttcaaggactgggttacctgtttgtgatctcgatacctgtatctgtgtaaaggtttgtttgttaattgacttggtatatgttttcggaactagtggtctcgatggcactattatagaaggtttggtcactttagactcttcaggtctctgtacttttgcaggcagtgtccttgggggtaatacgcgtttttccgcctctggcttctgtggttgtacaacctctaccccggcttctgccctcatacgggcaagaatagcggtaaaagattgactgggtgcctctttatcttcgtttgacattgttcctcaagaaagaacagagtatttgtcgtatatacagattgtataattaataataacgcttaatttttaaatgttcataatatactcttgagccactacaaaaaataaaattgaatgcgtaacttacgcgaaatttaattacttttcccaaaagggtaactcaatggttcatttttctcggtttcataatattaaagtattgatttttgaaatgaacagttatatgaacgcaacaaatttttatagatgttgtgtctcagactgacacgcttatctttcctatcattgaacaatggaatcaacagcaccaacacaggacatggcctttgaggaccgtgtcagaatctttcagaatttcctctcaatcagaatcaatgatgtacctgtctatgaaactgaaattcatcgtatgttgagaaacaataaaaaaagattaccaattaatattagatgaattaagaagttttgatttgaatttcgcaaatggtttacttaacacaccagctgaatatttacctgctgcgattaaggcattaaatgaaatggttcatgctatctacaacccagtggaaacaccatctgttgaattatctgaaaatgatgatttttatatctcctttgtaggatcttttggtgcttatagtgtgtctccaagaacacttaactcatcatatctttctaaaatggtttctattgaaggtatcattactaaggcttctttgattagacctaaaattataaaatcagtgcattataatgaggcaaaaaattatttttcatcaagagaatatagagatcaaactacaagttttgatccagttaatactcctgcaatttatccaactgaagataccgaaggtaacaaacttgaaactgaatatggtttatccgtttataaagatcatcaagttataacaattcaagaattacccgaactttcacctcccggtcaattaccaagatcaattgatgttattttagatgatgatttagctgatatcgccaaacctggtgatagaatccaagttattggtgtttatagatcattgggtggtggtttgaatgataacggtgctttcaaagttcttattattgccaactctgtttatcaattacatgctctttcaacatcttctaaagttacagaaaatttaactcctgctgatatagataatattgttaagttatcaagaaagaaacaaatttttgagcttttatcggaatctttagcatccttctatctatggtcatacatacattaaaaaggcagttttattaatgcttttgggtggtacatcaaaaactttggcaaacggtgcaagattgagaggtgatattaatattttaatggttggtgatccatcaactgctaaatctcaaatgttaagattcgttcttaatacagccccacttagcctattacaacaactggtagaggttcttcaggtgtcggtttgactgcggcggtgacaacagataaagaaactggtgaaagaaaattagaagccggtgccatggttttagcagatcaaggtattgtttgtattgatgaatttgataaaatgaatgatgttgatagagtcgctattcatgaagttatggaacagcaaactattacaatttctaaggcaggtattcatacttcacttaatgcacgatgtgcagtttttgcagctgcaaatccaatttttggtcaatatgatacttataaaactcctcaacaaaatattgcattacccgattctttattatcaagatttgatttgttattcattgttactgatgatattgatgatgaaaaagatagaagaattagtgagcatgttatgaatatgcaccgttatgtacctccaggttatgcagaaggtgaaccaataagagataaatcaaatattaaactagcagtcggtgaccatgatgtagaagaaagtggtgataagacatcaaaggtttttcttaaatttaatccaagtatacatgcaggtattacagttaaagttcctgatggttcaatgagaccgttagttttaacaattccatttttgaagaaatatattcaatatgcaaaggcaaaagaaccaataatgaccgaaagtgctaaaaatttaattgttgatatttatgcttcgttaagaaatgatgagaacaccaaaaattcaagaacaaccccaatcacagccagaactttagaaaccttaattagattggcgactgctcatgccaaaattagactctcagcaacagttaacgtcaaagatgttagagtggcagatgaacttttacgtttctctctcttcaaagaagtcaaaaagaaatcaaataacacaaataaatctccacgtaagaagagaagaactgatgatacaggtttatctgatgatgaagacgaagaagaatgatggtaaggaagcagatgaagaagatatggaaatatataattatccaaatcttcaatcatcaccaacccaacgtcaaactagatctcaaacacaatctgtgcgaattcatcaagataccaatacagaagttgaatccgttagaaaaaacttagaaaacttacaaacagcaactgaaagtactaatgactgaaaatataaacttaaatttaacagctgcaactactttacaaccagtgagtgctgaaaatgcaaattacaaccccggtgttctttctgacattcgttaccaattatacaaacgcacgctatctgaactattcaaagttaataaacaagatcaatatactttcaatgaattaaacgaaatgataaatggtaaactttcacaagaagataaatttggacctgatgaaagttcccatgccctacataagttagaaacagaaaatattattatgacatctgataattatatttatccaatttaagcttgttgattacatgtataatctctatatttttagttttatgtattttaaaatttatgtcacctttaggtgcagtattataattattcgtggatataaaattttagctccaggaaatttatgcatgatgtttcctttccgatatatagtaaagtttctttttttgagtctttctttaaccataaagaatgtccgaagataaaccacatggaatgccacaatttggtgcaagtggacgaaaaatcgtttatgatgaaaatgggaaaccgtaagtcttgaaaaaattatcacttttacacaaatatttaacttgattactaaccaactttagatgccgtacatgtaacacattacttgatttccgttcgattacaaacaatgctacatccaaagctgtagctggagttggtgctgttactagccactgctagtgatttagcaacaaatgatagtactccttcagattgtcctccggatgttgaagaattagggtagatcgacatggacacttctacacttcaattgctgcaacatatccagaaaagccaactgatgcacaaaaagacaatttaaagacatttatgaagtcattctcaaacctttatccttgtttctactgtgccgatgattttagagagtacatgaataaggaaaaagttcaagtcaccaatagagatgaatttggtaaatggttatgtaatgcacataacgctgttaatgttaaaattggcaaaccctgtttttgattgtcaattatggaaggaaaggtggaaagatggctggaaggatggtagatgcgattgagcttgtacataaataaagtttttaattaggtcatctatataatagacatttataaaaaatcgttacgttaatcttgataaatcaagcggaatactacttccacgtccactaggatatagcttgatacgagccttggaatttatgaggttttggtatttcgttttgttccaaaaacttgaatcttgaactttccatttttgtaaaacccgaagaagatgaggatggaacatttgcattcccatttttattcattgaaccactgattgtatatgctgaaatatctattttacgtatttcattgccagcaacttgtgtttgtagaatttgatccttctgttcatatgctataccggattttgatttatgatgtcctctgaatccacttccaaatttagattttatactagagaaaatattctcttcaccaacaggaatatgcgtcttagattgtaatggcaatggagaagcatgtgaagctggagttatatttagtggctgtgtatcgactgttaatgatgtattagagtattgattagttgtagatgaaggaggaggtggaggtggtgccttttttctacctgatgtcagtgatgtttgattagaaaatacactcatcgtatctgaatcatcaaaacttgtttgcttgtatgatggtgtaagctgacggtggtgcactggtggagctgttgatgggagagaaggtgcaggtggtgcaggagctggaggtgtaggcggaacacttgattgtaccgttataccaggtacaccaaaacctggaggtggtgcaggtggagcagatggtggagtcgaaactggaatggatggtgcagcagatggtaatgatggaggagcaggaggagcgggtggtattccactcggcaacgacggtggaatacctattggtaatgatggtggtttcggagcagaagatgaaggtatctgggtgattgaattattcgatttatgtgatcgtttcattatttcatccataagtggattaccactaggaacaggagctgatggggagcttgggggttttggcgctgacgctatcgctttatcttgctctaatggtgcacttattccttttgaagccttctttgaaacatccttttcatctatcacataactatcatttcttctttgattaatttcggctaaaaatggcaatcctcctgctgcaacagctggagttggtgctttatttgcagtatttttgaatgatgggggaggaggtggacctggcggtggaggtggcaaagatacagatgatgaaagtgaagggggagctataggagctggaggagccggaggagctgctggtggtggggctgatgaagtaattggaggtggtggagcaactggaggaggattaactgctggtacaggtggcgccatagttgggagtgcagggggtgtaggagcactaaatgatggaattgaagggattgatggtggagcagcagatgaatgggatgtatttgatactttgtttaccttatcatcatcaacaacatatgtatcgtctcttctattattgatttcattcaaaaatggtaagcctccagacaaagctggggcactctttgtattatttgattgtttccctgttgaaggtaatgatggtggtggaggtggtcccggtggaggaggaggtggtactgcagaagattgattgttagcgaatgatgagggtgtaccagatggtaatggaggtgctgatgttggaagtggaggtgctgatgttggaagtggaggtgctgacatgtttggtaatggaggaggtgcagtaggtgttgattgtttttgatctggtctctttgatggcatctttggctttgatttgtttggaatgtggtcggtcagtgaagaagagatagatggagctggaggtgcagttggaggtatcattggaggaactgctgtggggactgaaggaatttgtggagcttgtggtggcggcatcgttggaatggatggtgctgacggaagagatatcgttggaattgatggagcagcaggtggtttgaagttgattgaatttctatttggtcttcctgatggaacttttggaaatgatggagctgatatggcaggttctctaggttttgtttcagatgttgctctatgcttaagtttaggcataccacctgcaaatatatcacctaattgtggtggtccacccattgatggaacttgaggagctccagaggaaaatgaaggaattgctggtgcgcccattggcggtccattagatgatgatgagttggatgaattaccaataactggagctgatctatcatttgtaacagctttctttaaatgagcaccttttctaatatcacctagtaaagcgtttctatcgggtgtaactttaggtaatccttgagcaggaggggccattgcaggaggcacttcctggtggcagaggaggaggtggtggaggcggaggtcccataatgattgatgtccgtcaatattgattgtgattgattaaagaaagtatgcaggaagaaagacaatcggtaactgcaattactaaacattgtgaatcccctaggttcgacattatcatgatttgcttgcgtaataaaaaatatttgtaaaatttcactttttgaagaattttgtgtaatgaaatgtcttttgtggtaggaattaatacgcaaaatgttaggtagagtatatgtacgatggtttgggataactagaaatgttttacaaaaagaaatacctgacaagggtattaaaattgcctcaaaaactgataaatatggagaaaagactgttaatgctgatccacaaaaacttttacgtacagtttatatgacacaactaccatatgaaataacaaaggaagaacttcagtgaaatatttaaacgatatggaccattagaatctattcatatacctaaaaataagggtaaaacccatgccagaggtgatggtaatattgtattttctgatgctagaaatgcatatcgtgcatcagttcaaatgcaaggttatgtacttaataataaaccaatcaaacttttacttggtaattcatttcaaaagaagataaatgaaaaatatgatgttgttatgttgaaaaatttatcatattcaactgaagaattggatataatggaaattctaagaccatatcaagtgttaagagttggattagctagatcaccaattaaaaaggaatgtttagggtatggatatgcaagatttgctaatcctgatatagctgcaaaagcattagacgagcttaagaatgttaaagtaaagggaaggaagttacgtatgcattttgctgaaaagaaagcacatgattataagtttattgtgtaagtaatatgtatagaaaagtatataacttgtaaataaaagatatcaaacatttagtgtttttttattaaaattaatacacaaattagattataaacaggaaaagatatctaatagatctaaacataaatataaatatttaagtttcatttcatttattattttctttattaaaacagcttcacttcaaatcattaagagtcatcaacattatagtagtaggagtagtagtcatagtaggatattcaaattaataaatttattcctttgccttaacaataccaactttagcagctcttaaaactctaccgttaagttcataacctggttgttgaacaaagaaaacggtacctggttctttttcttcgtgtggagcttggaaagttgcttcatgtttatttggattaaattcttcatctaatggatcaattttttctaaaccatgtcttgataaagttttttcaaagacatctctagttaatttaacaccatcatataattgtttaatttcttcatttgccttaactgaatcttccttaacggatgataaagcatgaccaaaattatctaaagattcaattagatcttttgcaaatttttgaagtgcaaaatcttttgccttttgaatttctctctttgtagtttcttgtaaattacggaaatctgcctttgatctaatataactatcctttaattcaacatattctttttctttcttttctaatttttctcttaaagtttttaaatctttttcaataggagataattcttcattaacggcatcttctgcttgttctgatttttcggagtccttctttgcatcattaaagttgattctagcagatgagaaagctcttgcagggaagatagcttgagaacgagctgaagcttttaaaactgaagcgaattgtctttgcatgtacatgattagtatatgagtgtctgtagtgtagtactttagctataacaaatatataatactacaaatcaaataaagccaatagcaaactacttccttcaaaaggccaacttttttcgtcaaaacttgaaatttgccattcagtgagaaattcggtcatttgaacttttttttctttttctttttgctttctgcgtttcttatatttcttttctgcgtttccaactttttgcctgcaagcttttcgattctgcttattataacagttgtttttcttgtcaatcttattcttcttcttcttcttcttcttcttcctttatcaaactaatataatcatgtctgctactactataacggcagatcagtttgctgatgattactatagctctttacaggctctcacatttaattctcgtcctattatcgaatctcatactgcgttggctcaggagaatagtcaatttgcatcagcaatcgtttcagcaattgaacgaagaattgaaaaggcaataccttctcaaaaacttttcgccctgtatttattagattctatatctaaaaatattggtgtaccttatactactttattctctcataatttatttaaaacatttactcaaacttatggattagtcgatgatccaactaggtgtagattaattaaacttttcaaaacttggaaagttccaactgctataactggtttaccattatttgatattaatcaattggataaaattgaaacatttttgattaaagttacaaatccttcaaataacgattttagtaatgctaataatgttaatagtataaataataatagtttaaataataatactattaataataattctaatgatcttaacattgataataataataataataatataattaacaacctttctactcaaagggctccattaattgcatctaaacctaatttaattattgaagttaatgaattaatattgatggttaatacaagattacaagcttcacctaatgatgaaaaaggtcaacaaagattcaaattattaaatcagttaaagacaattattggttcaaattcttcaataccacaaacacaacttgatgaagttgcaaaacaattacaaagtataagagatgatgaaattatgaagcttaataatttgaaattacaacaacagaaagaattacttaaacaacaacagcaacaacaacaaaaagatgtaccattctctgtttcacaattacaaaattttatgaatatgggtaccaatggtaataatagtggtaatggcaatggcaatggcaatggaatgccaactaataataacaataataatgttttatttaatatgatgaattctgttatgacaaacaataaaccagaatctccagtagttaagtcaccaccatcaatgaataccccaccaccatccactaatccattgggattaaaaaatattgcattccttgaaaatatattgaaaaaatctgctaatggtaataatacaaccactaataacagcataaatacttcgattaataactttacaaatagtaacaataataagattgattttaaatttatcaaaccaacaaaggaatcaatacttgaagattttgtattatcacaaagttttattaataatcatgtacttactagtaatgaaatttcattattgtataatttcaaacctatacaatgtgataaatgtaataaaagattttctgataataatgaaggtacgattttaaagaaaaatcacgatgaatggcatcaacgagtagaacaaagaatgaaaattggtggtagtggattaggtggtgttgttaatagatcgtggtacttaaatgaaaaggattggattgaatttgattatgatttagatgagaaagagacaaataataatatcaataataataatgtcaataataatcatctttataataacaatgtttttgctatgaataataacaatggtagtaataatttaacaaagttaaaggatggtaatgttattgcacatacttcattaaagattacatcaaatggaacaaatgataagaaggatagagaggatagaaatgataataagattgatttatcagaggcaccaaaacatattgtacgtatacctgaatcatcaaataatgaagttatttgtaagatttgtcgtgaaatgcaaattggtatatttgatgaagatgaaggagaatggatttggaaaaatgcaattgatattaatggtacagtttatcattggagttgttggatggaagcaaagatgcgtaataataagagggatagatcacctcaaagataaaaataatgttctgcaaagtatgaacattttgtataattaaaactttataaaaacttttaaactaaacactttactaagaacaattacaaattaaagtatttgatcagtttagttgagaatcaattcaatgtattatatacattgtaatgaatattgataataatattagtatttaataatttaataataataaataattgtatttttttattgaatttataatatataaaatttgttatacacgaaatagtagatgaatagtaatataaaataaaatcattgagaatctaatgatgagctggttttggagcaagataatcttcataaactgaatatgcaataaaagcacctaaaccgatatagaaacctgggaaaagacccttgaatctattcgatttagagaacaccccttggtatctccatgcatctctctttttccatggatcagataaagtagccattgcttttagttatagtatagcaaaattcaaaagatctaaatcttactctaatctgaaccaaatttaatgttatagaaattcatgttcttctttaactattagagaggggaatgaaaaatattatttaataagatttctctggtgcacagatagaatttatttattttttaagggcccagagacgcgactgctggtttggggaaatttttaaaatttttcaccctatttaaatattttgatctctctttaacatgaatttaaggttaaatgctgattaaattgaattagttactgtttagctaagaatggatcctatatcgttacaggataatggtgaaactaatttgtcggagtctattttggaagaaataagaacttcagcttatacttgtctggtttgtaccgattatttaactccggaatctcaagtttggtcttgttcaaattgttatagagtttttgatttagattgtatcaaagattggtcaaaaaggggttcatcaactcaagatgatcattcttggagatgtccttcttgtaattttaatcataataaaattccaaaacaatatacttgttggtgtggtaaattaattaatccaaatattaattatttagaacctcattcttgtggtaatatatgttcaaatccgttactaaattgttctcatgaatgtacaaaatcttgtcatcctggtcctcatattgaaaaatgtacttcattgggtccaattttaaaatgtcattgtggtaaacattcaaaacaattaccttgtactttaactccttataataatggttggtcttgtgatgaaatttgtaatgatttattatcttgtggtatacatagatgtcagaaaaaatgtcattcgggtatttgcgatgattgtgatattattattgattcaaaatgttattgtggtaaatctcatgataaaatttattgtcatgatagattaccgaaaatttctaataatgaaaaagaaaaatggattggaaactttgaatgtttacaaccttgtgatcaatacctagattgtggaatacataaatgttcattagattgtcattcaatttcaaaagatattcataaatgtccaaatgatcctaaaaatttaactaattgtccatgtggtaaacataaaattaatgaattattgtcaagtccaagaaaatcttgtttagatccaattccaacttgtgataatatttgtaataaaagattaccttgtggtcataaatgttattggaaatgtcatacaggtgaatgtgctctttgttatagaagtgttgacaaagattgtcattgtggttttactcattattcaattgcttgtaaattaaatgttgaaggttatcaaccaacttgtcaaactaaatgtaatgcaaaattcaattgtaaacgtcatttttgtactaaaaaatgttgtgagtatagacaacaggcatttgatagatcaaaattaattaaaaaacaattaagaaataatgttattacaactgcaattgctgatcaagttgaatttgaagatgttcatacttgtaaacaaatttgtaattcattattatcatgtggtaaacatcattgtaaggatatttgtcattctggtccttgtcgtccatgtttagaatcgtcatctgatgatttagtttgttattgtggtaaaactatagtatcagcacctgttagatgtggtactcaattacctcgttgtccttaccaatgtacaagacctacatcttgtggacatcgtcctgaacatcataattgtcatgaagatgatattccttgtccaaaatgtacaatgttagtaactaaaacttgtcagtgtgaaaagaaaaatttggttgcaaatgttatgtgttatcaaaaaattgtttcttgttttaaggtatgtgataaattattaacttgtggtagacataaatgtaaaaagacgtgtcataaacctggtgaatgtactaaaaaatgtaatgaaaaatgtctgaaaattaaattatgtggacatgaatgtgaacaattatgtcatggtgataaaccatgtaatgaatctttaccatgtaaagctaaagtggttttaacttgtgattgtggtagaaaaaaacaaccaatgttatgtttttcagttaatgaaatggtcaagcaagaaaagcaaagaaaactagaagataatgaagccaatgaagatagtgaaaataatgaaacaaaaaatcaagaagataatgttgatgaagttacaccaactattccatgtgatgaggtatgtatcaaagaacatagaaataaactgttgtttgaagctttaggcttaaatcctgctagaaccaaagaaactgaaatctcaatcaaaatgaaaagagttcaatcaatatacacacaatttgttttaaatctttattctaaacaaacagtttggtgttcaagtattgaagatatattgagaaaagtattaacatcagcaaatgatataaattttcgtcaaatgaaaaattcacaattaaagcaaggtcataatttccgtccaatgaaaccaattcaaagaagatttgtaaaagaattagcagatgcatatggattattctcagaatctcacgatcctgaaccaaaccgttctgtttttgttaaattattaaatacatcatccttgcctgatatggatttaagtgaagcttatgcagtttacaaagaattcaaagaaatagagaagaaaaaagctacagagagatcaattaaaattctggatgcaaacaataatactggttatcatgatgaaaattcaataaatgactctaaagtacaatataattattataatggtataataatcaaagatgtttattttggtattactgttgaaactgttgatgccgcattatacaacttatggaacttgaaagataatgaaactgatgagaaagttttcccattaattaaaaagggtaaagttgaattcattaatgaaggtatgtacgtcttttatggtgaagatatcattgaagagttattagatgctgaaaatattactgatgtaaaatcacaatatgaaacacaaattaaatcattaagtgaactttttgatgttaaggttaaagaaaaaaatttagcattaaaatgtattcctgttaaaattgatataccagaaggtataattttagaaataatgaaagaagaggaagttgtaattctaccaaatgaggaagaattaaacaatttagaagatgttattgatgatcttaaagatttaaaaattgaatcaactgttgtaaatccaaaatcatcagaatggtggtgagaaccatttatagaataaaccctaaaatttatagatttataaaagtttactaaaaagtatattatttgtattgtttcaaaacccaagaaagacatgtagcaacatctctctttgaatgatatgatgattcaattacagtttcattaacgtctgttttaattactttgacattcattgtaatatgtaaagttgagtaactggaagttaactctattaaaatttttaaattgttatattgaagtgataatacactaacaggtgccatttttggattagttcgtataaatggatcattattataacatttctctaaggtaatagattcattggtactcttgtttggatcattaatatatttttcaattaccaagtcattttctattattttcattgcattatctttagtttcgccaacctcaagtaatagtgatgctaaaatttctttgaatttctttatcagttggttgtgtctagtatacatcatcataggtctaatcaaaacagcatgcttgtttcttgataatgtttctttactgagtgctacaggtggaagagacaattcttgtgtgtttttataattgttggcacataacatgattctgaaaaactttattatctcatcagctctatcattttcaggtaattcgggagtaggttgagttaattctggagaattaatatttaatgattcaatttgaaccactctatcatgaagttcaattctaatgtgattatcaacaattttgacatgtacattgactaaagttgttgcttctttgattaaactccaaaataattcattttcaaaaataaagaatcttgaattctttatttttgagataaaagaattgtcatttagagacgtttccttctttaatataccataagagtctgactgtccaattagttgttgactttcatttaaagtatcagagtttgaatctttagatttggaaaatttgaaaatcttaacagagacaactttttcaccactccaaatcttttctctttcatttgtattgaatttttcaaactctaaatgaccttctttaccttttttcaataaagctataccattatcaaaataattactacctgaatcaccataaccatatttaattgcaagctctttcttaaatgttttcggagtaacaactgaagtaattaattcattttgatgaaaaacattcaatacttccttccaatatatattttctttctctaaatccgtgctcaattttgaaacggtacttttaagtaaacgtgatgattcttgtaaactttggagtttccatccatgaccaattttctttgcatttgcatcgtctaaattacgtttcttttcaaattcttgatcacttattgtaattctatcgcatgaaagagatcctagtttcatattttgtttcaattgtgaagacattgatgaagatgccgcagcttgcctgacagatgataataataaagaaataaaatccaatgtcattgtagatgatccaagtgcagttcgtacatattgcagaatagcatttcttttttgaaaaaactctgcttccttcttccttgcttgctctatttgttggtttaaatctgattcctccgtattttccatttcaacatccattgaatctccatcattggttgtattagggacagttaaagtatcagtttgatcatcagtcattaattcactattaatcatatgtattaatctttcctctgttattgtttcaaagggaccatattgggtaactaatgaacgaatcatatgttcagttggatgtgcataatcatccttttcactcaacatttgttgttgatgtttgtaatatggatttggtaaatcgacatgtgcaccttcaataagagatttcgtaaattgtaaatattcaggttccgtcactggataaactggagatgcatcatcattctcctccttattctctgcctctttatcactcattgtcccactatctgtgataatcctatattacaaccaaagaaagagagttgaatacttgattgaaatcattacgtaacatttgaaaataatttttaactttacagaaaggctgtgcaaccataatgcaatttacattcaaccttcccttcaccgaatgctccttatcgttgtgtctatctttattactagtaaggaacaatgctgaacaaagatttaagtcaactgtccttggggccgcgtgctcgtttagacacagactatgttaatgaagaccatattaaagtatttcgggatgccttaagttatgatgaacacaatgattacaatgataatataactcgagctgattcaattgtttcattagctgatacaccaacaaaaccgcatagctctggtgttgaaactatatcatctcagtctgactggacaccggtttataataagactaaacctaggaaatctgaaattattgaaatcgatggtgctgctggtgatgataatggtaatagtgataaatttagcagggtaagcagtgcatcagttagtagaccagattctgcagcatcctcgatacacgttgatgaaaactatagcaactatgatgaatcctcaataacatttacaattcttagataccccctattgatattcattttttgttggacttttatcttatcaatcttatactttatcgtaagattatccatctcattttcagaaaatctaatgctgaaaagggataaagttagaacggaactagtcacaaatttaagaaactctaaaaattacagtgagtacgtagagaattcaaagaaattagataaatatctcaagcttgatgaatggtgtaatgatgatagatacaaatattacgattggagaaatcttagaagaactattggaaacctgagaaagttaaggcatgccaaaaagtatgaagatttgatggtggttttgcaaacttgtattaaatcaaattttgcaggtacggaaaacccgttaatgtactcacattgttattatggaacgaaaaagttaattgaaaagtataacagtgaagtggtgaaatgtttaaatattattattgataataaggaaataaatataaaggagaagaggatatttttcaaaattattaacaagaattttggtagaacatgtttggttttaagtggaggtgcatcattttgctataatcattttggtgtactcaaagcacttattgaaaatgatttaatgccaaaaattattagtggtacatctggtggtggtatgattgcggcacttgcagcaactagacagaatgatgaacttctagccttgatcaactcaaaactatcaagtaagataaacgcatttggatcagaaccttttggatttggatgaaaagatggtggactacaggtgctagatttgattcagttgaatgggctaaaaaggctcaatggtggacgacaggctcgaccacatttgaagaaagttaccttgaaacaggtaagatattgaatatatctaccgttccaaatgatattcactccccgacaattctatgtaattatattacatcacctaaatgttgtatctggtcttcaatgttagcgtctgctgcagttccgggtattttgaatccagttatgttaatggaaaaaactaaagacaatattattagaccattttctcttggtagtaagtggaaagacggttcattgagaactgatgtcccattgaacacattaaacatgtattttaacactaaattctcgattgtttcacaagttaatccgcatgttatgttatggatctttaaaaatcgtggtgatataggtaaaccaattatcagatcaaaaggtaagacttttagaggtggctttatattaagttacctagaaaacttgattaaattggaaattatcaagtggctgaaattagtgaaagaatttcaattatttccaaacttattagaaagtgactggtccaatctatttttacaaaattttggtggaacaataacattattccctaaaatagtattaagtgattacatgtatattctgtctgatccgacggaagaaagattagctagaattattagcaacggagaaaaggtaacttatcctaaattgttatttatcaagcaccgtttgaacattgaaagagtcattgaacgtggacttaaagaatgtgatgttgatattgatgaaacatttaatgcgccaccagatttggttacaaaaattgatcaaagcatcaaagatgacaatcttgaagagaaccgtattgatgatggtggtgcagatagtgatggtatgcttgatgatactgatagtaatgaaagtgggaggtctaatttaggatttttaggcataaaaatgaaaagaaatgaagtggtaaatgaagaatggtatggttcctccggatatgacgagaactacacaacagatgaagatacatccaatctaagtccataataactaagttcattagcgtatatataatattattaaactatctatctagaatatactttataatcatatatcaattgaccagtaatcatcgaaagaatcgattgtatccgcttctgagagagtcaatccaagtcctgatatcaaattccaaagactatctcgtacatcttcgaacctttctcttctaccaaccatgaatacaactttagaacctttctttgatgaaagcaatgctttaacggtatctactgacccagaacggatgttgatgtgaatatacagggtcagaaaaaatcaatatttcaaattttgtttcagttgaatatgatctttctaaaaactccgatggatttgtccagtctagataggtaacagttatttcatctgtcttttgtgaaatggtgaatttttcatcagaagaaagtaaattgcattcgatgttattaagcttgatattctgtgcaagattgtctataatttcaggtaaatcggtagaaataatatgatgttttgtattttgattagcaagtattatggaaactaaaccagttccagcgccaagttctaagattggagaggagtcattgtagtctaaccatgaagatgttattgatgaatttgaaacaatagcattagataagacaagagatgcaccccatgtaatattaccaactttatcctctgttaaagcaggttcatataatgcaatcttttcatttgagttatctagtttaatatatctagttgaattacctcttaaagcaggtgcagaatttgcagacatgatataagaagctagatcatatatcaaatctctttcttcttctgacaaatgtgataaaggatgtgcaattattcgtgtaagatatgcagttaaatcagttgatgccgttactggtagggctgtaaatgtgagaattgtagtttcaggtaaagataagtagttggatatttgtttgatattttcaggttgaagacctatatcatctaagcatactaaattatctgtatctcgtgagaaattagttgtctttgctggttgtaaaagtttgagtgttgataaaagaatatcaaatggagcaaatggaagtggtaaatcaagtacagttgccggtatttcctctatttcttcagaatctgccactactgcctgtaattctctttcttccttcttctctttctcttctctttctcttctttttcaactgaaatcaaaactgtttcgtttaatgtctgtttatccaaacttgcttcagtcttttcagttgattcatcttcaatagatacaggatcaaaaaaactcaagggatcaaatacatctgacataactagctattcctgcaaattagggaataagttcaagatccatgtaaagtgaaaaatttcaattaactctttgattccatgtagaacgaatatgtcaaagattacgtaatcattaaaatatttacatgactttattatgtactgtagtaattcatgaaactttcgtgtttgaagtgtttccaaggattgaaagcagttgtgaataggccatacatacatgacagatatacccacacttagcgcaaatgaggtaggcgtttttagctgaacaggaagaggtgtttgtactttcaagacattcacttccagcaattcatatgattgggccaacaattccacgaatgcaagcacttcaacgtcataaaattcctttatggagtgctattatattgaaaagacaacgtaaatgtaatatagttacacctgaatggctttctattgaagtattaagaagagcagtcagtttagaacgaaggaatcctgcatcacttttaacacctgaacaacttaacttaccacaattatggccagctatggctcgcatgcttttacaaaatgcacatgatgatttaattgattcaccacatgaaattcgtgctgctttacatgatttacaggaactaagagatgtaaaaatacatagaatgttacgtacaggtactcaaaacctttatggattatcacattttgaagttgcccaacttagacctttattattacgtcaaattaatctccttcttaaacttaatgaaggtgataatgatgaaaatgaaaatgggactggaattgataatggtattaacgatggtggttttgataatcacgataataatgatgataacttaaacaatgatccatttgacagttacccatctaatgaagaacacaaagcatttggatcatctgatggtcctttcaacagtcttacaacatctccaccgccatttcctaatgagtctacactaattgaagaaaatccaacgaaacgtcgtcgtatgggaggaaacacagctccacctcctgaatctgactctgattccgataatgatatagaatttagacgatagaatttttgtacactactttttatatatttatatgttagtaatatattttgtaatacttagaatgaatatcgattgtataagagatagaagatatagacttatataactggtttaatgtgtatgctgacataagcaatagatgaaaatggtgaaaattacaaccttccattttgtggaataaaaaaatcaaatttcatgaaattctttaacattatcgattccaacaatgcatcattttgattttcttaaatctatcaagacaaccacttaaaatgcttgcaagaacacgcccatcaatactagtggcacctcgtttatttttgagatttgcttcaacctcagaaatcgtttcaaagaaagatccagctgttggaatcggtgcaaaatcaagaaagaaaaataaccaacaacgtccaacaattaataaagttggtgttccacatgatccatatattccggttgcatataatcatttaactttgagtaaaccaggacaatcattacgtgcactttggaatagacttaaattatttgcttttaattgggttcaagtttatcaatttaaatcaggtatggaaaaaggttataaaccacaatttgttcaatggaaaaataaagcaataacaactttcattcaagttaataaacattttgcaaatcgtaaaattgaaaatattcgccccgttgtttcagaattcgtttattttcaattaggtaaaagacaagctgctctgccaaaaggttcaattaaatgggaattagtccaatttaattcatcaccaaaattattatcatttaatgctttccctcatgaagatggttcaactttattatgccaaattatttataaatttgatacaaagcaaaaatggattgttaagaatcgaaatgataataatgttactgaaacagttagagatatggtagaatatttagcttttaatattgatccttataatgataatgtttgtcttgcaggttctgtctttgaagctcctcttgatagaaaacttgaatcaaaattagttgcttcccaatcaaaagcattagaatatatgaatactaatggtgatatatatagatctgaaccaactgatgaagttaaaatgattgattataaagattaattattttaaaagctaaaaattaaaattaaaattaaaaattaaaagttttaaatttttatgtataaagttttccctgtaaatatactattttacattattaaaatacattacttatcgatcattcattgtaggtgttagattcaatgatgcaatatcacccataacactttctacatcagcaccaccactaaaatcttccgaatcaaaactcatgtttttatctctaaacaatcttagattaccatttgccgtatcaacacctctaaaatgaatattagtttccactgtttcattattatttctcaaaatacctaatctttccgatcttaaactattgttagatgatatgtttatactgctttcattttgtatcttttgcttgatagcttcttcgtaaataggtggaggtggtaattcctctctacctgcatgttcaccatcctgttcattattaatcctttcaattttaaacctgttatcactgtattcgggtgggttattttcatccgttggacttaaacccattagtccatcaatagtatctatcttatccatatctttattcgataacattttgtgaatagaatctgatctatttatagatctggacaatgtggcagataataatgatgtagcatcaactccattgttacgtattgttttatcattaggaatcattaatgttctattttcactactattatatgataaactattacccctagaaatttcccaattgtgcatggataatggtgaagttgcaataagatttgttgtatcacttatggtatttccctcactcatcgcaccattattaatagtattaattatattacttgacattaatggagaacatggtgcaaataccgtattttcatcactactatcatcgggtgagctgaaatcattttcagaatttaattccattctcgataaacttttattcatttcaaacattccatgcttaagagcatcatcatatgatggtaaattcatcgtttcaggaacacagaatggtgagacaaaaacaattggggtatcaaccacaacctcgtaatgatgcattttaggtttattatcattagtcttgattttaggatcaggcctactaattctaaaagatatttgtaatctgtgtctgattttcaggtttgaaaaggtagcatctggtaaaaatgtatataaagatgtttcattgttattgcttggattattattcccgttatttatattgttcaaatgctcattagtttcatggtaattgtttttcggagtgaatccttgattgatactatcattgttacttgagaatgaaaaatttcttgctcttcttttaggagattttgaaaatccataatcatcatccgaaagaacttcgtttttatcgtttgaattaactgaaaaaattgacattgaatcattattgtagttaatgttactatttagaccattactgttgtctctcaaacctgtgatatcggaagtacctttacataaattttcataaactgtagaaataaatttggaatcatcattgcaaacaaatgtaagaggacattgtaacttaactggattagtaataacaacatcttcttgaacctgtgagttactatgattactattttgtgaatcattgtgaccactaaaagaaccatctaaaaatcttgacatctttttggatgaatgtaaaaatcctgatgctgaatttttaaaactactacttccatgactattggatcttgaatgagaatggatatgagttttggaaggagtttgtaacagtgaagagctgtaaagttcagattcttcattattataacaaaaggttaataaattatcattaacacaattagcaacaatttctgttttctgtggtacagctctaggatttacaacatttgatggtttttccctcgttttaatttccattaaagtagttacagtttccttagatctatttctcaaacttttagtgtcttctgcgagtttgctatctttggggttctttgctgtatatgttattttttcaataatattaatcttgatacgtttgagttgtaaatttttcactaatggaactaacttcatttgtaacataaatgtattattgcgtaagaacttattattcggagatatgtttaaatcttcaggtggggataactgtgtgtactttttaggtaataataattcataatttaaagctttattccaaactttattcacgtaaattgatttattcaaagttgatgttgcatcagatggaggtaatctaaccgaaggtaattgataattataattgtaaacaatactttttatctgttgattttgataattaaaaaaactagcgccactatttgctctacgtctttgatcatttgtagcttggtcatttacatgactgattgatgttgaatttatagatgtagatatacttttattgcgagaagatgatgatgagtttcttctaattccaatttttttgaaaaatgatgttttggaagaagaacttggagaaaaatttccatttagagtattattaattgtgctactaatactattgttatcaataatattcatatttttggcttctaaatcaaactttggctcttcaaatctatgttgatgagatggtgaagttgataagaatgcagattgtggggcctgtaagttaggtaatggagcaattcctttttgaatttgaattgagaaatcatgtgaaatatttgagtttggagcatatatggactcgctggtatttaaagggtatacaactggtaataggaaaatataataacctggattcaatggttctgattcagtttcggaattagcaaatagatttgattcaacaactgagtcattgatcaatatttttgattctgatacataattgtttggtgataagggtttataatatttaactttttgagttggttctggtgaaacttttgaatccaaatgttttttaatattattcattgaatctaatgataaagaatcggattcgagtgaatcattcagagtggttgtttcattataatcatttgcagatgcgttggtatttgagtctttaaaaggaatataacaatctggattttgtagatctagattccaattgataggggttgaagttctatatctttcatcaaatggttctttcttagaaaactcagttgcattccatttaacatttgcatgtgtgtgatagttgacttttacgatatgattaagattaacttctttattaattttgaaaatgataccaaaggtatgataagtaattccatttccattatctttactgattgattttgttgggaaatcggaagggatattcatgtattgattgaactttggttagtaaagtttcactatgatcattagtaaaatcgatttcattatcatctccgtcattatcatcgtcaacatcattttcattatcgttatcgttatcattatcattatccatatcatcatcattatagtcatcctgaatatttgaatccgtactattattgttattattattgtttctccttttcttcttttgagagttaaagggtagaaacaatatttgaccattacctgttatgaaagtttcaatattactattatttatgattgtagaattgattggggtattagatgactgcaatggtataatttttctctcttaattgataagcagttaatttaaggggattcatatttaaaccttgatgagataaataagatattagagctttattataatatttcaagtttattttggaattagattcatctaaaccagataatgaaagtaaatcatccatacttgtcagattaaaatttgaatttgttgaataatctgaaatacgtataaccggagtttgaccatttgatgaagatttattcaaatgaatattattgatattaccattatttgacattgtacgagaattagataatgaaaattgtttatttaattgagaatgagtattcatagttgtaaattcattaacatttacatgaacattattagatttcggatttaatgttggattggataatgtggcgtaaacctggtgggacggttgattatgaaatgggccctgcaaaccgatatttgaaggggggtgtgacattctaagaaagtgataatgtatatactttcaatactatgatacaagaatggactaatagaagtggtatattgttaataagaaaaccagaaaaaggtaaccccctggaattgaaaagaaattagcattgaattaaatcctatatacaataatatagcatcatcaggtcctctctaagccgtgataaatttcacaagtttctctgacagcgctgagccagaaaaactggaaaaaaggcaaagttttatatttccagtggggatgttcaaaaatatttcccagtgaaccgtattacgtagacgggagattggtgggaaatggtgggaaaaatctgttactagtggtgaaattttttatttttttttcaatttgatattaaatggatttatcgaatttgtattaattgattaattgattaattgattgattgatttgacttataagctctttgttctatacaggtaataacctatctagacactcaaactattcttatcccaactaactcgaattgcatctactcggtggaatgcctgaaacaactcaatctaattctctaacaggtccctcactggattcgatacattctaaaacagacaaatgtgatatatcactatctcatgctcctaaacaatctcatgttatatcaaatgaacactataaaaaggataccctaccccaagagactcgttctaactctaactcaaataaatcaccttcaaaatttacaccttctcctctatcattaccgaaaagattttcattatcttcagtaaaggatagtaacaataataaatcaatacatccaactactaatcaaaatacttctcaaaatatacatccaaatcaaagttttccacataatttccaacagcctctatatcctatacaacagatacctttatcaactcaaagagatcaatcaaatccaatgttacattatcaacaaatgttctataatcctcaaacaggttccatgatgtctttacctgtagcacaatcatctcaatcacaaaatcaacctcaagttatgtatatggtaccttcaaatcaccctatacaatctattaatcaacatcatcctcagcatgctcatttatttcaacagcattctcctcgtgtacctcctcaacaacaacaacatatccatcatgcaccagtttcccaactggtctatatgaaaactgcaagtggtcaattaattcctgttttaacacctgtttcatcagttaataatataccttcattcccaattatatctccaacttctaaaattaataataataacaataacaataataatttcactcaaccaagtaataaacgacaaaaaacttcagattcttcatcttcttcaatatctcaatccgctgaacgtttacaaagacaacaaattcaacttcaactccaaagaaatccaaatattaataaattagcagattcttctaatatttcagatatttataatgtagagaataataataataatgaaaatgtacctaaatcaactacttcacttggaagaaataatgaaaatgtacaaataatcaaaaacgattctaaaaatggtgaagatgatgatcttgtcgctgaaggtgacggtgatgaagatgatgatgatgatgatgatgatgatgatgatgatgatgatgatgatgcaaatatcgatcaagatgataataaaaatagtaataaacttcatcaagtaactgataacaacaatatttctaaatcccaagttgtatcaaaggaaactccaacaagtatagtctcctctacttccccattatcatcagctaattctgttatatcaaatgattcaacaagctcttcaaaatcatcaaaaaaaattacaggaactttaacaataggctcgttcacttacaaatacagtcaaacattatccaacaatccaacaaaagatcgtgaattgtttgatagacttgctgaaaatgcatggaaaacatgcatgtctaagagatgatacttctattgctacaatttttttctataactacataaataacctttttttctcctaaaattttgcttctatatcataaatatgtgtaatatatatttttatttttttgttctttttaaattactacagttatgaactaaacttgcttcattaacaaaatttccccattttaagccttttttttgacaaacgaagttactttttgttactaatataccaaccgcatatacgtatttcggactcagactcatgcgagataaatttttttcggcatcatgaaaagttggccttcatcgatatcgatctgacagttgtttctttatagaccaatgcgacgtacaggtttaaatagacttatatcgaaaggtataacatctcgtttatttatacagcaaagaagcttctcattaactgaaaaattatattcaaaagatgtatctggatcattaaatagggttaaaatttcattagaggatacacacaatgaagaaactataagaaacatatttgattccccaaaatactggaatgattttaacaagcaatctgatgatgtggagaagaaggttggtcaaaaatctactaataaaggagtgtttaactctttgatgaatttgaaatcagaaaaaggagttgggttattttgcaatccataccttactagtcctaaaggtttgattcaatttgcagaagaaactttagaaagtgcaagagcattaactgctgaaatgattaatgatcaatctgttgaaagtttacatgtatatattaaagatttggataggttatcagatatgctttgtagagtgattgatctatgtgaattcatacgtgtagttcatccaaattcatcatttatcaaagctgcagaacaatgtcattaccaattatttgaacatatgaatatattgaatacttcgaaaaccattgttttacaaattagagaaagttttatataataaggaattgaatattaaagaaaaactttcaagtgaagaaatatccgttggtaaattattatatgcagatttcaagaaatctggtattgatatggacagtaaaaccggtgaaagctttgttcaattatcttcatatattgctaatgccggtcaagaatttagtaataatataacagcacccagacaaacatctattaagattgaaaaggatgaatggaatgaaaatgatattaaacctgaatatttaaaacaattatctcgtggatttgatggtagtttatctattccgatctatggtaatattccctttgagttattaagatcatgttcaaatagtaaagtacgtgagaagatttgggttgctttacatagttctccagatgaacaattagaattactaacaaatcttttaagatgtcgtgaaattttagcaaatttaatgaattgtaataattattcacaatattcacttaatgataaaatggcaaaatctcctgaaaatgttatgcaatttttgaaaggtttagttaatgatttgaaaccgcaaatgctggaagaacttacgacactctataagagttcagaacaaaaggataagaatgtcacactatcagataaagaaattgtaactttgatcaaaccatgggatagggagtatttattaactaaacatatgatttcacaaaaatctcagcaaaatgaagatatatctgaatacttttcgttaggtacagttgttgctggtttatctaaattattctacgctatctacggtataaagttagttcccgaaaaattgaaaaaaggtgaagtgtggtctgatgatgtccgtagatttaatgcgattaacgataaaaatgaaaacattggtataatctacctagatttatttcaaagaaggggtaaaacaccgcatcctgctcacttcactgtttgttgttctagaagacttcaagatactgaattaaatgctaatgataaatttaggctaaaatcattcccgactactgaaacaattgaaactgttgtccaaaataataaaacttaccaattaccaattatttcattagtttgtaactacaatattggtatgaatgatgcaaatatggcctttttaacattagatcaaattgcaacattatttcatgagatgggtcatgcaattcatagtatgttaggtagaactgaattacataacgtttccggtacaagatgtcaaaccgattttgttgaacttccatcaattttacatgaaacatttgctcgtgatgaaagagttctgatgacaattggtagacattataaaactggtaaacaagttccagttcaattattaaaaaaccatttacaatctgataaaattttgaaatactgtgaaacttttggtcaagttaaaatggcacttttagatcaaatataccatggagcaactaatgcaaatataaataatgatttcttcaatgttattgaagtatatcacgaattggaatcaaacttgatgttcttagctgatacaaaatcaacatggccagggaaatttggacacttatactcatatggtgcattgtactattcatacttatttgatcgtgctattgcatctaaaatttgggaaaaactttttaaagaaaatccattttctagagagtcagggtgaaatatttaaaaacgaggttttatgttggggtggatctcgtgatccatgggtttgtctttcaaaaacattaaataatgaagaattagcaaagggtgatgttagatcaatggaaattataactgatgaataacaaattatagaactgaaatactgaaaatttataaaatctaaacttttatctcatttattttacttctttttaggtgacaatgttgcattttgcaaacagttcaacattgtactcattaaccatattcttgaatctatagaactaaatcgcaaattagatagagaaatatctgtaacactatttgatgaatcttttgtagatccggcaagtagcaataactccgataccaacacagaacttatcgatataacaaaaacaccgcaatcaggaaccattagtttgttgtggcgtgtcacggacatgaatgatgttccaatctatacttgattttggatcccgttcattgtataatacttttgccatatttttcacgagtcgattagtttcagattcattggcttgaaacattgagtcaaatacaaatgcagtttgtgtatatttttttgaatttgacgatagtagttttgcaaatacaaccagactccaatgagatcctccctcggaggacccaaaatcatcattatcattcaatggacaaaaaacgaactgtgcatctgatattccaggcggtaaaactttttcctttacaagctctaatggttcagggtgattagcgagcaagaaagtgaaggtgggtaacattatacaaattggagacacaaatatatctttttgaagcttatcgtcatattgataaaatttagagttaactagtctttttgatagtaatggtaaaataaatccattatagactaaagcataaaaccaagaaattgtactatctgatagccattcatcatcgcataatgtaggtaaatcattgcaataaaatggaacgtcatcaatttgaaatatcactgatgtttcacttaacttttctgtgtttgattctgcagcctcgaatgcattgtttcatcagtgttttcaaatgattgattttttgtcttggagataatgataatgtcgctgaagttaagtctaactcactacttgtattatttttctttctttgttcattttttttcctttgaatcttgttacttttggaaagtctcttctcttctctagcttgttttctttcctttaaagacaacttcttccttcttttagcttcttctttcgaactttgcaaattatcttcattatcatcatcatttatttgagtagaatcttcaccttctaaattttgtccatagatggttgtatgagagctcaactccgaatcgtcaatacgatagttagacagttctgtaatatggcacaaacttcgcaaatattttccatattcttgtaaactttcatcttcgtcttcatcatcaaaattatcttttatcagattccaacagatattcaaaacatcaaaaccatctgtcttatattcatcctttttattctttgatttcttgttagcactcttcttgttatttttttcatctccagacaatgaagtcatcccctttctaatatcaactacattagcaacagatgtatcttctattataaaaaatcctttatagtcattaaaaccaattttcattcttgtaaaaatcaattgatggcatatatatcaactttgcgaactcatcacacaaaaaatctttaaattcgaaattttaaaaaaattgatttacttcccaaataggaagttaagatcttcaaatttcaaaatttttcatgtatgtaaccttagaaaaattttaaagttgtctatcgatagctataacctcttcttcgaaatagaaagttaagtataaccacataataaatatgtccgaatttgacttagaggagccacttacatcaactgttagaccattaaatgactcggttatcactgtccgtatcatcaaatcattcccatttagaaatattagaaatcatgttttccaacatatagatttagcaaatactacaccaaaacaattaatggaattaattaaacaaaccataaaaacagagggaagtcttagaccttatagaaatgttgaatttgatactataaagatttacacacatgcacatggaactaaaaccatgaatcttgtgataaatatggatcatgatgatgattgggttttagacctaaacgatgaaactcattctctttcatcctatggaattgaaaatgaaactgaactaagtgtataccgacgtgaagattacgaagcttaccgtttaaatcctgttgataaatggtgttaatagtggtgtatcaagtgtgaaattcatgtaattgctcacgtgatctattattttttaaaaaaaatattaaatttaactaattattttttcgtataacaagattcaaaaactgtggctcacattttccttactatacaacacacagggtttttttttatagaaatttattttgtattatttggcatcattaatatccttttttaataacattcttctccgatatttaaactttcttattgataacattgttatacaaactgttttatcaaaataaatatgcccaacggagaccttgttaaagacccgttaaactatcttcaacgcagttgttcgaaagattctaaaattagtggctcattggatttgagtttaccaaacgttttaactggtaaacttaataatgtcaatgaaaatgttacaaatgatccacaaaaaatgaaaaagaaacattccttagaaactattgaatcaaaagatgggaaaaaattaccattaaaatctgttaccccatcaaataaaagattaaaattagttccaataaatgaaaagaaagcgataaaaaatattttaaatgaaaattatgaagaaatgatgagttctaaccatgatgatttagaagatgttgatcataaatattgttatcgtcataatccaagaattagatgtaataaattagcagatcaacaacagttaactaatattcaaaataaattatcaactttctcaagagaggatcaacaagcaattacaagtgtttggtcaacattctccaattcctcatacgctagaagagctttaattttacaaggtcttatatcacaatgttgttttcctcagttatcagttgtatcacatgaaatttcacatttattaaagattgattttattgatatgttgccttgtgaaattggtttaaaaatcttatgttatttagattgtcaaagtttatgtaatgcagctcaagtgtcaactaaatggaaacaactagctgatgatgatagagtatggcgatatatgtgtgaacaacatattgatagaaaatgtccacaatgtggatggggtttaccattaatggctgttaaaaaattacaagaaaaatcaaataagagaaagaaaaatttaaagtctacatgttcttctaatattgtggaacttgatggctcatcaaatcctgaagccacagcaacaccaaccgcagttaccacaacaactgataatcatcaagattttacaagtccttcattagaacgtaaaaaatcaaccccacaagaaattatgagacagaaaagaccatggaaagctgtttattctgaacgttatacagttgaaagacattggagaaaaggtttttattcattgaaaaaatttgcaggacattcagatggtgttttatgttgtaaatatgataataataaattattaatgacaggttcatatgacacaagtattaaaatttggaatactgatacgggtaatttaattagaactttaaatggtcatactatgggtgttaaagcattagcatttgatgatcaaaaatgtatttcaggtggtttagatgcaacaatcaaagtttggaattggagaactggtgaatgtatttcatcatatcctggtcatagagaaggtgttttatgtgttgatttttttgataaattaattgtaagtggtagtgctgataaaagtataaaagtttggcatgttgatacaagaacttgttatacattaagaggtcatacagattgggttacatcagttaaaattcatataaagagtaaaacattatttagtgcaagtgatgattcaactgttaaattatgggatttagaaacaaataagtgtattcaaacatttggtggtgttgaaaatggtggtcatactgctcaagttcaatgtgttatcccatttacctatactgaagaactagttactgatgttacaaatgatgaaattataaggggcaataataatggtgagaataacttaaataatacaaatattaatgaaaataatgaaaatagacctagtgaaggtttaagcagtagagctaatagtgtaagaaatagagatcatgtacatccaacaaataatgatgaaaatgagattgaaagtgatgttgaagagacagataatgacagtgaatttgataaatttataaaatcacgtcgtaatgttccaacccatttattaactgcatcacttgataatactattaaattatgggatatgaaaacaggtaagtgtatacgtactcaatttggtcatattgaaggcgtttggtcgattgctgctgatacatttagaattgttagtggatctcatgataagagtattaaagtttgggatttacaaaatggacaatgtatgcatacatttgcaaatgcaagttcagtttcttgtgtaggtttaggcgattcacgtattgtttgtggtttggaaaatggtgaagttaaaatgtattgttttgattgtaaagattaattaaacaataaaagtgaaatgaatgatttttaagtgcttttaattgggtggatgggtttatatttatataaattttataataatttaaaattttggaccaaaatttgtcgaaatgttgttttagtacggggttcattagaggaaattttacaaacaacttagttgttatcgtaaataccagttttttgctttttaggtggctcaacatgtatattaaaaggtaggtttttctaataatttataacccagagctattactatcactcgccactgaaaacagctacttgtttcatcaattactagctatcagaagcaccatctaaactgttacggatggtgtaactaactcttcgaagtgaaccataatcaaagtcacgacacaatttttgtcgtgctaaaaagacttcatcttatcagccgcattctgtatatacctccgaaaggttgtttcgataacaaacaggtaaagatatcagtatcaccagcaaaagtataatattgaattatatacaataaagggttttaaatgaaaaaaactatgaacggaatagtatatgcctgtatatatttatatgggtatatttacatacctctaacagtaaatggataagcagaagcaagattatatagagtaatcaccaatgaaaagacaaatggtatccaagtagtcattctaaattgagcggcatcataaatagcaccaagaacaacaccaactactgatcctgaaaggaatccttggaatgcacctactattatatatccaaaagctgtgataaaaacagtatttttatttcctgaaatgattgaactagtgaaataacttttatatgttggattatctttaaaatcatctacattgactatttgtaaatcattattctgttcatctactgaaagttgatcatttccattattattgatattattcttacatttaatattttgtcctaatataaaatagtgtgtaagtaaaattattattgaacagcctaaataaagtccagtcatccaaataactgtccaaactgttgtaaacatccaaatatcttgaaatttataaagaaatgaagattcatagtcatatttattagcacctaatgggaagtaaagtgatggaaaattcggtcgtttgtacccaactgggggcatcaccatgattgtttagattatcagtttgttatgttgatttgtgaaaaagccccttaagcaaaaagtattagtttcaagaagagagacatagtctgattgttaaggtgaaacattaaaaatttctagaaaatttcagataaaagattgaggctggtgattgatttttgttgaggatttactttttcttcgaatttgtgataaaattaccgacaagtgattcggtggcaacaatatcatttcttttatctttcttttcaacctcaaggagaattaatagaaacagtagagtaaattaaggagcatattaagatgtctgaatttacaattactataaagatgacaggtgattcaaaacaccaattacaagttacatcagatatgacagttattcaactaaaggaaaaaattgctaaagatttagatgtttcagttgatcgtcaacgtcttatattttcaggtaaagttttaaaagataatgatacattagagacatataagattaaagagggacattcaatacatttagtcaaaggtgcggctaaatcatcaactacaggtaatacatcgagtaatactaataatactaccacaactaataataataataataatactacaacatctgttccaagtaatttagaagcaggacaaaatgcatttgatccattagcaggattaacggatgcaagatatgcaggatataatattccaatgccaacaatggatcaattaggatttggaagtgatggtatgcaattaccaccagagggacaaatggaacaaatgatggataatccattatttcaagaaagtatgagatcaatgttatcaaatcctcaaatgttagattatatgattcaacaatcaccacaattaagatcaatgggacctgcagctagagaattattacaatctgattatgttaaaaatttattaactaatccacaagcaatgagaagtatgatggaatttcaaagagcaatgggaggtaatggattatcaaataatggatcaagtttcccagcacctggtaatgttaataatgaaagtacagaaaataatactagtgcaagtgctagtgctactactaatgctaatgttaatgctaatacaagtaatccatttgcatcattatttggaggtagtaatcctggagcaggttttggagcaggattaggtggtaatccatttatgaatccagcattaaatcctaatttaatgaatttatttggtaatccagcaggagcagctgcaggtactaataatactaccaccgatactagaccaccagaggaaatttatgcaactcaattacgtcaattaaacgatatgggattctttgaattcgaacgtaatatcactgcattgaaacgtagtggtggatcagttgaaggtgcaattgaaatgttatttaatggatctgtttaatttagtgtatgtataatctgtattacgtaacccaaagacgcgactgcattacataatcaacataaatactattattagtaaagacactggaatactatgacgacactattactattactattactattactattattaactttaatttaataaagggtgcgaaacccgttttttgctgatattatttatatttactgaaaataaatttttatttttgtttagagatcaacactgctggtagatcgtctatatagattttaaataaccgtttctctgtccaaatttattgtgctatattattgatatattctagatattattgatattattgatattatagacaacttaactttatttatatataatatgtttatgtttatgatcattacacgagtatgtttaactctattgttactgacacgagttataacggcatctgtttcaattggtatggaaataacagagagtaaaaatggtgatagagatttattatcagatattgatttagttcatcaaaaaatgtattcactgaatgatttaaatgatataaaaaattcaaaaattttagatgattttaataatcaaatatcgaaaattatcaataattatcttataaataattcttgtttaagattttatttacatgaatatagtactcttgaaaatgtacttaatatgaaaaattcaaaaattaataatggacttttagtttcaattaatgttgatttttcagatactgattttcatattgatcaaaatagacaaaccataaatattaatattttagataaagatggtaatacattaagaaggataaataaaataaataatgataaattaaatttattaatagattatccaatacattcagaaaatttagaaatttataatcaacaatattttgatttttgctttgaaaatttaaaacatgataaatcatggaattcagttataaattcaattttcgcaaaattagatttatcatttggtatggaaactataaaagaaaaatataaagaatcatcagtttatataaatgatatttcaagtaaattagataaaatttatttagaaattgatgcaataactgatcaattagttgaaaatttgaaaacttctgaacctttattaagaaataagaatgaagatacattagaaaaatatatgaaatatgttattataacattaattatttacataattgttaatatttgtcaaatttcttggttaattagatatttaaaatctcatggtttgatataaattaagtataaaatactatactaaactatacaatttaatgatattaaaggatcaacccacctcaatttagactacaattcactcgttttatataaaataataataatcataataataataatcataataaataatgctgtaaagaagaagaagaaatatatagaaattatagatattatatagatatagatatcatatcatatatcatcattgtcagtactaatgattaaatcagaattatttgattcagtattaagtttctcattcgataatgatgaaattgtaactttatttgattcatcattatcaaatggtaaatttcttatttttaattcatctttaactatttgtatacgatctaattgattttgaattacattatcattttctttaatacattgagaatataatttaatatcatcttcagttacaggatcaaattcatcatcatcatcatcatcatcatcatcatcatcattatgatcgttattattattctcaatatttaaatttatatttctatgaattttagaagcatcaatttttttcttattaattaaattattcattaattgattagaatcttgtaatttctttaatgcaagttgaagtttttgtaaaatgaagtttaactgttcatcagaagattctttaattgcattttgaaattcaggtaattgaattggtctttgatattctgacatttatttttctttttgttagatactatagaattactgattaataggtttcaataaataaaatttatgatgtaacaacggagtaattaaaattattagtaaaattaaagtctcaatgttactttatataaaataaggagtgtaaagaatgagtactgataacaatagaaataatgatggctactacattgcaattaagtcatcaatgaaaagaagacttaagaagaagacctaagaagaagaggtaagaagtagacctggggaaaaactgtgataaaatattattgcaaacatccagcggagagactgttattatgagaaaaacgatatgtagtagtgaaatttcaatgttacttacaagccctgggcggcggcggcaacggcggctgcccccgcggaaaacattggtcacgtgataagtttgttaacttagtacattacgtaataaaccccgctatcttacaactttaatgcggggaccgaattattgatataatcacttaatagaagataacgtaataaattccaaaattctatcaataggtccgcccataataaaaatttgattatttgttggtcccaaaaagataacacgtatggaataaaagcaagattagctattaattacctcagagtactatgaaatgacgtaaaaagtgcccttagaatttttaatttcaattttttgttccaaagattaggtaatgtaacactgcataactttaaaaatatgtgctaatgcagagtgcagcgaatttggaacgcagtggaaagaaaaactcttgatttttaccttagtgttaccgtgcctggtttaagaaattaaacttttttagctttgtgttgctataatgaccttattcaatatgttgatagtgatgtatactggggtttacatgtgtttatgtgtttatgtatttctgttttatgccaattatttaataaccgagtattccacctgattttctcaaaattaattatcaaattattaaattattaaatttttttatattaataatatctaaatagatcacagatcataaatcataaactaaaagaaggaataaattaacaatggattcaaatacactattcgattatttaaatacttatcaaaacaataatattcatcttaatctactacataaaaattcaaataataatattattgataataataatccttcatcattcttgcgtcctactttaaataatcttgaatctaattctaatattattcaacaaaccaatacccgtacaaatacccataccaatacaaatacaaatacacaaaaaaataatttaatcatgccaataccggactttagaaacactccgagatgtttaacacctttaaatgtcgatttaggtttaggtttgacttcaaataatgatattaaacattcattacaacaacaaacatttattaaaaaagaagatgataatgaagttgtaccaccatctgctaattacttattaagtccttatacccaaagaaacaataattataataataactataattataattataataatcatagtatttcaaattcttctgattatgataatactattaaggaaaaagattattatgttttcaataccccaattaatagtgatgattcattatcaccttatcaaagagatagtttagatagtgcatttagtgcaataagtgtaatgagtggcaatacatcagttaataatgattattcatttaattataattttaattcaaataataacattgaaccaattgatttaaattttaatttaaatgaaaattcaattttagattatgaaaatagtttaaattcaaaattacaattaaatatttctttaccaagtcaatttaataattatattgatcgtgcttttgattcaattaaaattaaaaaggaagaagattttgatgaatttgatgatgctgatgatgatattttcgataatgaaaatatgaattttgttaatgataaatttatgaatgatattgatgaaattttatcagataaaagttttaatgattatcctggtatagtagttaaaaaggaagaaaatgatgatatcgaagttaaagaagaaactgatgatgatattcatttatgtgattgtgatgattcacattcacactcaaatttacaatctaatacaccacaacaatctaatgaacaagaaactgaaaattcaaataatagaattacacgttcaagaaattcaagtacagttaattcaaagaatattagaaaaaattcaacttcaaattcaaaatctatgaaaaattcaactaaaatagagaaaccatttaaatgttatgaatgttcaagttcatttacgagaaagacaagattaactgaacatataaatagagttcacctgggtaaaatttatcaatataaatgtaaagagtgtggtactagattaagttcaaaggaaaatttaactagacatagtattgttcatacagataaatttaaatgtcaaaattgtaatagaagatttgatagaagttacagataccaaagacacttagagaagtgtcatgtttaaaatttaatgatactacgtattttgtttatttactaattaatatatataataataacataatataataaatttacacttttaatgattataaaaatataataattgtaattgtaatttaaattatgataatatctgatttgatcaacaataataatttatagtgataaccttcaatgaggcagaaatctattgttagtatcttatcatcatcatcatcatcatcatcatcatcatcatcatcgatcgagttcggagttgaccatctcttttcgcgggaagaaaggctagacctcgtctaaaaataaacttcgtatatcttcttcaaaaaagtcccagatttatcagataggaacactgtggcgggtgccctaaaaatttactagtcataaatcttaaaatgacgaaacaaaggcagtgcccaacttaaattatgtcttttgaaccccatttttattattaaactattaaactagtgtgaaactttaattaaaattcttttgtgaatctttatgtccgaacaatcagattaaacggaactttttgtttttgtttttctaaattttctgaatttttcacttttacttattgaatttcttttttcgatgcattgtgccctaatttctaatttagactaagatttattaactctagttatctgttatcttttattagttcactagcttcgtttatctccactaattagatgttattagtctattatagaaatgttacatatcgttgataattcaatataatcatcgtatcaataacataaaattataaacttagatctttggctgtgtatagtttttacaatctttaaacttcttttcccttccctacatcgtatttttctttagttcatcgtctatctactctacatattaaatgttgatgaagattgaaattctgtcctttcatgtataggatgatcattaggattcggtgcagattcatataaaattgaagttggtaattctttccttggttttaatgcctgtccacgaatctctaatcttgaaattgaaattttaccatttggattattaattaaatcacctaataataaaattgaaaattctgatgtttgcgggaatttacgtctaggtaaatgatgttcaacaattgatgctgaaatttctgctgatggtccaatatttggtggatgttgtaccatatgtgtaggttttgtattatttgcactttcaatatcatgttgttcctttaaataaaattttaattcctctggtggtgatggtgtagtaattaaaactgaaacaagtttaactggaactgtaaatggtattgtaattaataattcaggtccaaaatctgtacataatggtgttgtatttatttcttttgtaaataatttaccaacagttgatggatttactgcattagaaactttaatacgtccaatatcaatatattctaagagtgattgggctgcagttgttggaagtggtggttctcccggtggatgggtatgctcatgattatgctcttcatcatgaccatgaccatgtccatgattgtgattatgatgatcttctggcattgttgtatacacttctcctatatccaaagactagtgtgaagtaaactccatcgattgccacatgtgcatgcatatgaaaagtatatactgttacgttatcctataataatggaaatatccaacacaacagaaaacagtgtcatagtaatctaccaaagtggaaaaaacgcgtctttactcttacgtactccttttgtgttaagcgtttaatgaagacgcgtgaagttgtcaatataatattttttatgaacgaacaattttatattgattttattattattaataaaatattatattactgatcataaattattatcatttttatttacttttctttttttaatttgtattcgttcatacatcacatttgataatgaatacgggtatatatggtgatacaagttctgcaattacaagagctggtcttagacaagcagatttatcaactcgtttggaaatgtcaaataagaaaaaaatgagaaataaaactcaaagtgtactgtataacagtgcaatggctagaagtaaaggttcattattagatgatacatcagtttatagtggtaataccggtaatggagatattcaaaaccataatcttaatcataatcctaattataatcataattataatcaaaatacacaaaatttatatacccatcaaaattttagtcagggatatgataatcatggcaatataaatcctaataattatcatatgaactataataatatgcaatatcaaaacaatcaacaatacccaaattataatcaacattctcaatatcctcaacaacaacaaccacatcagcaacatccccagcaacaacaataccagaataatccaattattatgaaaaagcaaagagatcaaagtaataatagtagtaataaagactcaaattatcgtgaatcatacatgtatttgaatcaatttaataataacaattcccaaactttagcacctaatgcattacaaagaattagcggatcaccaaatttaaatagaagaatatctggtggtaatggtagtataattggatcaccaattattacaactcaagctaataatgaggaacaagctagaaaaatctcatttaatgcattaatgggtgttaaaaatgggaatattaatgataatactgatgataatagtatgatagatgcaattaattatatgaataaatatgatttaaataataatgatgattgggagtcgattgatgaagaaaatgatattgattataataatgttgaaaatgatgaaactaataatataataaaaagattacaaattgaaaatagaggattaaagaaaagattaaaagatattgaattaggtcatgattcaaattcaattgttgcagatgatgaaaagtattctagattagaggatgaatataatagattagctgaaagttatttatttttagataatgaaacaaaggatttgactgtacaaaatgattcatattttaaagatattacaaagctgaggaaagaattaaatgaattaaaggaaaataataatggttcatctgatgaaatacttttatttactaaaggattgattgacaatttaccaaactacgtaattaaaagtgacgattttattaaaattattggtgataaaataccgaaagaattagatgatttatgtacaaatactttgataaaaattgaaacttcaaagaataatcaatctataaatactcctgcaacaattaaaggatctacattaaatacacctgttatgggatctgcatttacaacaccaaaattaaatagtccaaatcctaatataggatatttgaatgatgaagaaatttctaagtttttaaaagatgaggtaaaacaattaaattttactattaaatcattagaagatcaaatgaataaaatgagaattaattattctactagaattcaagaagagagacaaaccattatagtttcaacattacaaaggaaacttcataatgagtttataaatgaaaatcctaagaataaaaatattggacttaaaaattttagtattattaatataataccacccagtaatgaggataatactgataatgaaaatgaaaatacccataatagcaaacttcctgtactagatttcaataaagaagatacatttatatccaatcttgattcacttacagattcaccaactaatttaagtttacgtgatgatagttcaaatattaaattaagttcattatcacctataactccagtttctgaagcaccggaatctccaaagaaaaggcttacaatatattccacacatacctctgaaagtaatgatgatttttattcaatagcttcaaataatagaatatctgatgattcattagagatagaatttgagacatttactacatgaacattcactacattattgcatatactcaaagtaacttgttttatattaaatttaaattataaatattaataactataccttattataatataattaccgtccaatctagttggtttccttcttaactttacttgctgcttcattaactttatcctttgcttgatcctttaattcatcagcttttgcattggcatcagcagtacctttattaatagattcctttgccttacccaatccttcactaattttatcaccaacttcctttgccttatcacctaaagttgaatatgcgtatctttgagttggattgactctaattgctgataatctgaatgaatttcttaacatggttgtatttataattatatttgatgttgtttgtaacagtcattaatgaacagttgattcacatggaggaatttatctccttttataatctaccgaatgggacaggattgaaagatcttagagaacgtgatcaacccagccctttcactgtgatgaggctacaaatttagtttcatatttacattatatacactattacttctctcattctatctctcatatatactacaatccttacccatgtatattatactctaccaaaatctacacaactcattgtggagacaccccagttaacaatataagacgcgttagttacagcgaattatttcccccatactaaactcagataaaaattattttctacgatattctccattaaattttcatgtaaactatcagagacccccattttttcattggatgcatcttatcttatcttatttttctttattcttgtcctttattttttattcttgctgttgttgttgttttcttctgagtgctctctttaaacatacagtctttgctaatttccatatggggtacccaaaatacaaatttaatagattatttaaaaaagttagtatagtgagtactcttatactgattttatttattatttttaccttaacatttcatggtagtagtaaatcattcgatttaatagtattgaaaaatcctttccaaaatagtatttcaaaatatacttcattatttaatacaattttagaaccaaaatgtgaaaattttacaacttataatcttgattcaagtaattattggcaatattatggattctctcatcatatgcaattaaatgaagatacactgtcaaatattttacaaattaatcaaaggcaagaggaagaaatatcaagaattcacaacgaattaataaattattatttaacaccaaaatacccagcatttgcaagtttagaaaaatcagtcaatggaaagaatctagaaaataatagaggaattgtttatgtttcaggagaagattattattggttaacaattttatcaattaaatttatcagagatcatatgaaggataaaacaactccaattgaaatttttgttccatttagagatgctaatgatcattattgtaataaaattagtatgacttatgataatgtaaaatgtttatatttttcagattatttaagttggcaacaaatgaaaaaaatatctggttatcaatataaatctttagcattactattaacatcatttaatgatattttatatcttgattctgataatataccaattaataatattcaagaaatgtttgaagatgaaaattatagaaaaactggatttgtttcatggccagatttttggaaaagatcaacaaattataaattttataaaatgtcaggattatcaaattatgcaaatccaatttcaactataccatcaattgaatcaggtcaaattttaataaataaaaactctcatttaaagacattattattatcatattattataatttttatggacctgaatatttttatccaatattttcacaaggatttccaggagagggtgataaagaaaccttttatttagcaagtagggttgttaatgaaaaatcatttgttataacaggtcaaacaactaaaagttttggttataaggataaaaatagtaaatatattggacaaggtattttacaaatgaatccaagtaatagtaataaatattggtttttacatgttaattacccaaagctgaatatcaataatttatttcttaataataattatcaaaaaaataataatataaggaaatggatgattataaggaatgcacaagatgatggtaaaggtacaggattttggaaaaaattaggtattgatttagaatttgaaatttggaatttaatgattgaaattttaacagtcgattttaaaggttttaaaatttttaaagaaattggtaatgatgaaatttgtgattatgttaaagaacatgttaagaaacttcagaattctaaattaaatctgatctaataatatacattctatgttataaataagtattagtttttctactttatttcattaatttatagagtgtaaaatagttaaagtggaaaacttccaagaagcgacagtctctgtataatacaatcagtaattaaatttatgcatgaagtttgatctaatctatagaggactctacatttctcttacgtagggtggtatatataggtaacatgagacaatctattaaacaaatctgtcgacatgttagtagtaagactatattttcacaacctagtaataatttaagtagaaaagatattgaaaaacttacaactagtgaattactttgtaaattaggatttattgcacaaccaaatgcgggattagttcattggttaccattaggtaagggagttttagataatgttaataatattgttaggaaaagacataatgaaaataaatgtgttgaagttgaattatcatcaatttctcatagttcaatttgggataaaacaaatagatggaataataatgaattatttaaaattggtgaatattgtttagctgcaactgcagaggaagaaattacgacattagttacaccatatttaaatagttataaaaaaatgccgtttattggatatcaaattacaaggaaatatagaaatgagaaaagatcaagaggtggtttattacgtggtagggaattttatatgaaagatgcatatagttttgatattggagaaactgaggcattgaaaagttttaattcaatgaatgaaacatatgaaaaaattttcaatgatttaagattaccatgggttaaagcaaatgcagatagtggagatattggaggtgatttaagttatgaatggcatatagttagtgaaattggtgaggatgatattgttaaatgtaataattgtggtagctgtggtaatgttgaaagatcacatagtattaagggtgaagatggtaaatttgttgaagaaagtgatgttaaatattttttaagtaaggaaaatgaattaatttgtatttatttccccaagggacgtaaattatcaatgaaatttgttaaagaagaagatttagttgattttaatgaacaattgatgaataaagatgagattattaataaatttgttgaaaataatgaacaaaatgatggattagttacaatttttagattaattgataaacaagttggaccaggtaccaaaatgccagatttaccagataatgttaaatttaataagaatcatatgattacatttcaagagttagatattacagagtcacaagaaggagatcattgtgatagttgtaaagaaggtacattagttaatatgaaaggtgttgaagttggacatacattttatttaggtactaaatatagtaaaccattagaaggtaattttattgataaagataataagaagaagccatattatatgggatgttatggtattggtattagcagaattattggagttattgcagatattttaagagataataatggattacgttggccaagtattattgccccaattcaagttagtattatcaataagaatactaagaagaatgatggtgatgttaaatttgaagatactttagttaaggaacttcagaataagaatattcgtgttgagaatgatgatagtgataaaaattcatttggtaagaaattaaataagagtaagatgattggtgttccattacaagttattgttggagttaatgaaggaattgttgaaattgagactcgtggatgtttattcagtgaagagtttaggaaaattaaggaaattgaaggagataaatggggttgggagataatttcaaaatctaatgttgaaaagcatattgttaaaaaagaatatgcatctaaggtaattgaaatattattaaaagacatgtaaatagtaattgtaatcataataatcttattagagattagatatagtatagtatatatagtatattagaattatatagaaattatatatagatatatagattgaatgaaatcaatatattattataatttgtaatttattagagattttttgttcatatataattaaaagacagaacctgaaatttttgcaagaacatgtaaaagtacaactgagaagataaaagcaacggcaaatacaagaacgattaaaggatcaattttaaaacctgaagcttcatcattgaaaattctaagcattgaagcagaggacccgccttgacctgcagctctagcagaatttggttgattaagagcatgcttgtttagccttattatcggaagcagcctttctctttgcaagggttttagctcccccagggacagcagttgaagcagacattgttgttgtggtaagagaagatgctgagatgtagattgtatagatataagtgtaagatacaggtggtcaaattgaagaaaatggacgagagcgtgaaatttgttctttggtgcgacatttttcgttgttgtgggtgggtagaaatattaatggggaaaattcaagtttttgctgttttattagttgtattggttattaatagagctcttctctcgtttctgctggtatatctcccactgtagagcttatacacactggcaatggagtctgatgaacaggagttgacacccgtattggcctctctttccttggtggacaataatgacgctaatacttccacacccgctgctatgactaatgatattagtattaacaatgatattagtattaataataacaataataatactaataataataataataataataataataataatgatgacgaccttattcctactgctatagttattaaaaatattccatttgcaatcaaaaaagaacaactgttggatttcatgtctggtttatcattaccacttccttatgcctttaactatcatttcgataatggtgttttcagaggtttagcatttgctaactttaattcaattgatgaaacttcaatggttgtatctgttcttaatggtagagaaattgatggtagaaaattacgtgtagaatataagaaaatgttaccattacatgaaagggaaagaattgaaagagagaaaaaagttaagaaaggtcaacttgaagaacaacatagatcaacttctctgacatctctggcttccctatattcaatatcttcctgctcctccttatttatcttcaaataacttaaatatgaatatgaatatgactacaaataataatatgactaatattaacaatatgaataacaacaccaacactaataacaataatatatcattaccacttaattcattaactttaaattcattaaatatgaacgattttgatattaataataataataataatggtattataaataacaatatcacttcaaatcaagctcatagtattcaaagtattcaaagtattcatagtatgcaaaatttacaaaatttacaaaatttaaatacaacaactcaaagtatacaaagtttacaaaatttttcaaataatttaccaaatttttcaagttttaattcattttctaataataatatcaataacaataataacacaagcacaactactaataataacaataatagattaatttcaacattccctacatctgatcaattattacaattaccagcagaaattaactttaattctcctgaaattctaacattttacactaatttagtcattttcaaggaagatattaaaaataataatttatctactgatgaattaatttataattatactttgctacctgaaactttgaaaattaattcaataaaattgatttgtgatctgttagatttatcagcattcttttgaaaataatttattgattataaaaccagatgaatttaatacaaaagctcaaactactggtggtagttcaattttcttcaatacaaatactacaaataataccaataccagtaatactgctaatcttaataataatagtatcaataataataacaataatgccaacaacttaaatttccaaccttcattaattagatctcaatctcataatataaataattctcaattatccaacaatagattaagacaacatccacaatcttcaaggaatatatcacaaaatcaacaatatacgcaatcatcactaggtttattaaataataataatctgaataataataataattcttcaaatttaaatagcttgaatttaaacaacataaatagtacaattaatgccaataataatagttcaattccatcattacaacaacttcaacaacaatcacaacaacaaactaatcaattacatcattcatcatcaactgcttcattaaatgtattaagaaataaaggtttaacaactccttcaactcctataactccaagacaaggtactttcaatacaaatcttaatacattatttaataatacaagttcaaatatgagtaatacaatcaataatacattaacatcacaaatttctaatcctaatacatcaaataatttattaaatccgccattaggttttaattatcctcaaataactggtggttctaatataagtatgtcaactaataaaggtttggatgaattatactcaaatattgattacttatcatttgataattccacaaattgaatattctttttacttttatcagtttctactataaaatcaacctttgttttctttccacccctctttttatgaatatattatacgaatatgaatgaatgaaaaacctatttaacgactataaacgtgtttctattatcttatataatcttctattactcttttactttataacattaacatgaatatatgaacatgaacttcaaataaataataataaattgtaataccgtgttcgctatataaatttcccagtggcatctctcaacatgattattgaatttacattgacttcacacattctaaattgttaaccaataccattcaatgcattgggcaacgaaagttacaccattggtgttattcacagcattatcaatttatcttcgtcattataaaataggtgataatcattcaattatttgggatgaagcacattttgcaaaatttggttcatattataacaaacatacattttatcatgatgtccatccaccattaggtaaaatgttatgtggattatccgaatggattgtaggttttaatacatcaaatagtaatgttagagattatgaatttaagagtggatcacaataccctgatgaaattaactattatggaatgagagtatttcaagttattttcagttcattgattatacccgttgtttgggatacttgtttaactattaattattcattacttacatcaatattgattactttattaatatgtttagagtcatcatttattgttttaggtaaatttgttttattagattcatttttattgtttttcatggcaactacattttggtgtttaactaaaatcaacaaacttaaatttaaagaaggtaaatcttttcaatgtgacgtttggtttatattgttaggaattagtataggttgcgtatgtagtattaaatgggttggactgttttttacttcagttgtcggattatatactattttcgatttatggattaaattttgggatgttaaatttagttatattgaatattttaagttttggattagaagaatagtttctttaattattgtaccaagtttactttacattttattttttaaaattcatttagatttactttatttaccaggtgatggtagtggttcaatgaatacattatttcaagctaatttaagacaaactgatattgtaccacagccaagatttgttcaactaaatgatataattacattacgttcacagggtatgaattcaaatttattgcattctcatggacatatttacccaagtggtagtagacaacatcaaattacaacttacggatttaaagactcaaataataattggagattattaaattcttatagtaatgataatagtataacagtctctaagtttttaagaaacggtgatataataaatttacaacatattcatactggtggtaaattacattcacatccaataaatggacacatatcgaagaacttctacgaagtttcaggttatggtgatggaacatttggtgattctaatgataattgggttgttgaaattatttcacaattacattcatcaaattcaaaatattcatgatataaatgaattaccaggtaatgatctctttgagaactatattcatcctgtttcaacaaccttcagattaagacatgagaaattaggttgttatttaggtacaacaggtaaaagttatcctacatgggggttccaacaaggtgaagttgtttgcctaagtgcacctaatttagattcattatcattatactgggatactgcagctaattggaatatagaatcagttattgaatcaaaattaccagttgataatgattattcatatccaaaatctaattttttcaaaaattttatacaacttcaacgttcaatggcagcttcaaataatgcattaactccagatccatctaaaaatgataatattgcatcatcatggtgggaatggccacttaatgaaaagtggtattagaatgagtagttggtcagcaggtgttaggaaaatattatatgtttggtaatccattgattatttgggcaacaactataaatataccaatcttcatttatttattattttcaattcttaatcaaatggagaaatcaaacattatctattgatgaatattcattttggaaaatatttattacagctattattccattattaggttatatctttcaattatttacccttcattattatgggtagagttatatattaccatcattatattccatcattattttttgcaatatttatggtaggattttcaattgattatttaaccatacgcttgagtgcaatactgaaaaaattaatctatcttgcattatacttgattattatcacttcattcttgttatttagtcctacatgtttaggtatgattgggccatctaccaatttcagctatttgagttggttccctacttgggaaatcggaaattaccaaccatttacctgacttcctgttcactctttcattctaaacattcaagaaaagcattgaagaggttttcatttcccatttctattagacatttatattaaatatacaccaatgtataactaactatacgggccctcacagtaacctattatcatataggattacatcatcgtaaccgttacacaataagcaaaagccgataaaaaaaccatcgttcgctgcaaatcggtcaaacgacaaaaggctttaagtgttgtaattgatctaatgtttttacttctttaatcttttctttttaactctttcatatcaaccattatcctggtctctatatccatgagtgctggtaccatttgtgagaatggtaataaggaaatatttcttattgtctttacttatcataggacttctatattcaactattagtgctttaagcaggtctacctattccgaaagcttagtttataagttcctaaatctacaaaatgatttatcccctctgattacaccacatgaagttttcgatgaatatacaatttcaaaaaaaaatgcattgacaacgatatctaattcaatatacaataaattatcaaatccggaattagcaaattcttcatggagatttactaaaggtttgatcaatcataaacttgatgaaaatacttgattcccgatatattgaacaatatttacagaaaagacaaactgaacatttctatgatccaagaattacattggctgtttatttgaaagctctaaactcggcatatactgaaggatctaataaaataccattctcatgggaagattggactgatttatcatatttgaatgaatttttgaatgatgataaaaaaatttcatgtgcagatttcatgtctaattttgatatcaaaacaaaatatgagatagatccaacattgaaatctagttcttatttgaatcaaactttttgtttagataatgaagagtatttaaagacaaatgatggtaaattcagagataataaattacttccaggatttaattttcatcaaaggattgatgagaaatcaaattttattggtcaaatatataatgcaaaatcatatcttttgtcatatgcaccaccaccaacattcatttactttttaaatgataagggaacttattataaagcttctcctgttcaatcaactaatatgattgataatggaatgcttgaaaactttaaaaatacagattcatttagtggatttgatccaattaaggaacaaaaaagtatgaatactaattatatatcacataataagaatgattttgccgttcttttgaagaaaaataagaattttcctatatgaagtcccagaaacaaagtttgatttgaactatagtgaaacattccctcatatttttacaaataatgcacaagatctttcaactcatgaattattattcaaagaatctattgaatactcagattcaatattggaagaaaatttacataaatacttcaaggagatcaatataatatttcctgcaacttattcaggtcataaattaacagagagtggtgctcattatgattcaagatttttctctggtttattaactgaaatgccaaagagtaaatatacaccaaggtcaccacactatgaaaaaccacaaacagatgtgtcttcatcagatagtacagtcaaaagaagatctgtgattttatcaaatatgattcatacgattcttacgacaactttccatgaaggattggtgatgattcctgctcatgggtcacttttggcgtggtattttaactccggtacatttccgtgggacactgatgccgatgttcaaatgccaattgaagatttagcaactttttgcctcaacttcaataattcaatgattgttcaaaatcctagatatggtacttcaaaactctatgtagattgtactgacagtttgactcatagaagttaaaggtaatggtaataataatattgatgctagaataagttgatgttgattctggagttttcattgatatcactggactttcacttacacatgatcgaatatcaaaaggttacttgaataatattaaaagttggttaccaaatgttgatgtgaatacatatcctcatgccgaaaaagtatcatcaactgttggtaggacaataagacaaaaacctgtctataaacctaaaaccccagctgaaatagaaaaagataatatagcttatgaaattcacaaagaaaatagattatacaattgtagaaatgatcattattatacttatgaacaactttctccattaagattaacattatttgaaggtgcacctacatttgtttcatctgagagcaaagcatataaatttatgttaggaattgaatataaaaagacatcaatgtcaaaacctgttcatgacatgtatgttttcattaaagagttagcattatgggtacatgcagatgatatttattatgcacttttgaataatggtatccaaatcaattccgaaaatgaaacaaagtgctttaagaagaagaaagaatgttaaaggcgcaacagtgtttgaaaccttatagacgtaataaggctatagttgtttcagaattagtgagacaactctcttttcgaaattacaggtgaaacttcatttcacagtgaaaattatagagatccaatgcttaatattattgaagaagtatatcatgatagagtttatacagctgcacatcaaaaggaaatggcactttttgattacagttggcaatggaaagttcccttcaatcaatagccaagtcgacatttcaagtgattggaaaagattaggtcaatggatgttagaagaccacccacctaagaaaatgtcatattttgattatttgatatccacggaaaaagaagacaaggaaaaattagaaataacaaaaactgaagatgatagtaatgaaagatgtataaagcatttgttaaacttactgtatttttaaaattttataacttttactagacaataacaaaactacctaacgagtttcataaacgaaaaatgttaacactaaaccacctaatataacattaataccaaatataattgcaattgatgcaatatcccaaccaattgcattgacatcaaatccaaatgttgataaaataattgcacctggaacttcaatattcaatccgaatttcttttcctttaaaattaaaccattaacttcattaacagataatgattcatatgcataatgaaatactgataacttttcaatccatgataatccgaagggtatactatctttattaatgaacaaaccagcaaataaaagagagaaaagtaataataaaacagatagaatggttgcagatcctgaatctttgaccataattgcaataaccataacttccatggcagttgctagattgaataaaataaatgcaccaattgcaatccaaaacttgtatcctgacatatttaatccaaccagtggataaataattgccaataaaataaccggtggtaaaattcttaatggtaaaacatcacaaaatatcttagagaaataataacttaatggatgataataattatttgatctttccctgacaaaaacagatctctcttgagagaatgagtctaatcctgtaagagtactgaatccaaataatgtcaataaaaagaaaaacaaacctaatctgttttgaaatccactaattgtattttcaacattataatataagtatgaacaaaataatcccattaataaagataacaagtaatgtccaagtaaaagttttggatttctatatgagtttttaaatgttcttgaagaaagaatgataaattgatttaaccaattagccttagcaattctattatcagtttcaaaaaataatgatgaagcgtgtgatatttgttcatttattaaagcaataacagaaacagaaatatatgaatcagtaaaaagagctgctaaattcttgtcatttcgggtgataattttagtaggatttaaagttttaaccaattcatctctatgtgacgcataatgttcccattcagatacctcattagtttccatacttaggatcattgttatgagtatgttcagttgttgattcaagatatgattcaaatttttcattagtgatatcaattaagtaatctgcaatattataaccgatcggacaattaaatccaacagaagcaaaatactttggacaatctcccatttcaccagtataaataacatcaccatcagataataaaaccagtttatcaaataatgaaacaatattacttcttggttgatgaattgtgaagataatggttctattgtaaagtttagcaagtctaactaaacattcaacaacattaaatgcattataaccgtctaaaccagatgttggttcatcaaggaataaaattgatggagaagttactaattcacaagcaatagcgactcttctcttttcaccaccagatatacctctttcaatacctgaaccaattaatgcatccttgatatgagatattttaagttcagatagaatttgtaaaacttttgattgtttaacagcaaatggcatagaattaggtaatcttaacaatgcactattaagaacagtttcataaacagttaaagtaggaatcataatatcatcctgattgacaaaccctatggaatctttaaatatctctttttcagttttggtagttattctttgaccatttatataaatatcaccggttatattaccacttttattctttcctgctaaaatatctaataatgtcgacttacctgcacctgaactacccatgactgccatacactcaccaggtttaacacaaccaaatgcattattcaaaatcactttattgttaatagagtaagatatcttattgaatgaaaatgtagcctttttatattcctctaagaccaaatctgtattattattatcatcactactataatcgtcatcatttaattttattgaagataagaataatggagatgatttaactctatcaaacaataaaagaacaacaaccattgaacctagaagcacacttgttagcttagtgaaatcaattaaagtaaattttcttttatcatggtatttcaaatcctggaatttcagatttatgaacacattcacttgaacgacagaaaagattaatttgaggatcaccgaaaacagttgaaattaaatcattcatacttggttcactaaatttacaattctgggatgcaatatcacaagtaaaatctgctgggccttgaatctcatgagttaaaaagtcagatatatcaattgaaccattttcaccacataacattctaccaggtaaacaactacattgagcatcttgacatttataatgagtagtatttgcatttaaatcatattgaaaatcacaagtagacagatcacaatagaaactttccttttgatcaatccagaattggaaatcacaacgttcagaagttttgttacaactgaaagtaacttgaggaattttaccatcaagaattttcaatattttgtcgtttgtaacatcacacatttgattaaatttattgataataataccagatttataacaagtacctttcaatccaacaggtacaaatgaatcacaaacttcatcattttcacacatattacaattaataccaccccaaccatcattacattcacaagttgcattttcttttctctttggtctatttagcccatcagataaaccaccacatagaggaattgaacaatcatcaccaccaaatccacttttacactcacaatgaccagtgaaaggattacaagcagagaattgtgtacatgggaaattaggtaaattacaattaaatgcaggtggacatttttcatcatcatcattaccatcttcaccctttggttttcttataggtataccattgatatcggattcaccatcattagtaactgtttgattgatagctatctaaatttgatatgtaatcattaatacttttctcaagttgattaatacggtcatctgtaaatcttatagcattagaaatatgagacagactcaccagtgatactataagtcctttaatgtgcatatctactcaattgacaaccagatgaatgatattactgtacaaccctccaaaacagagccaccgttgaatgaacctcagcaatttcaattgacattatcagaacaaccaaaaacaataataattacttatgttacgtaataatatatttttcgagggacatgtgtatacaattacgtaatattttttataaatctctgtacactattacaagtaaatactcaaatttggattagaagaaatcatcaaggttcttagaattttctgcatggatgagatcaaccataccagttgggaagattggagtaccctcattatcaagtacatatctgaaaggcatttcagttgcttcatgtttactgaaacgaatttcaggataatcaataaatttaatatcttcaaattttgtttccttttcaaggataatttgagttgttctaacagctgtatcagttgtcatttgtaaattacctaaacgacgagttggacaatttaattttgcctttaattcacctgtacgatctcttggtggatgatcacctaaaataccaccaaatataaaatatttaaattcatttgcatcatttggttgtaaatcaatttcagctcttggatctaataaacataattgatccttatttgatacaccattagtttcagtaagatatggtacaatatcttcagttgtccattgtaatccaagttctattaattcttttggaatatcagattcagttgtaccctttggtaatgaaactaaaaaaagattttccttaccaacatctctaataatttgtgaatattctaaaacaacccatttagtgaacccttgttccatatgttctataacgtatttcattttttgtgccatttttgctgatatatattactttactattagtaaaaaagagtgtactagagatacctacacagacaacattatatataactataactttacacaagtaaaccttccatgacatcactttccactgagtgaaaaaattttatagtgagtgtggaggctcattatgaattaatatcattcatacgatctttctctgctttccttaggatttcaagtaaaagatcgaagtttctaatcttgtctgctgtcatccatttctgcattactagagaagattgttcagatctctttaaaataaaatcacatatctgcttttcatttattatactaacatttgatatatgttgggcaactttaatctcttgaataatcttctcaataccttttaagtttttagatgatttgttcatatggacaatttttaatattataccaggttgagaagtttcaatttttaatccacgtaatattaatgctaacatcgtcacactatttattactgaatatttatgtctatattgataaatataggtacgtaaataatcattaagtgataaagataatactttgatagctatacgatcctgtgttaaacataatctaatattattttcataaatttcattagaatttaaagaaattgcttctcttaatatagatgcaaattgaccatatttcattatttctttaaaattttctatccaatcttcaaacattgatatatgtctaagtttcataatacgtccaagttgtctcggacttaaagttgtatcatctgaacaaggtaactcaaaacatggtaaatcatcacaatgtcgacaatatgattcgaatttgattcttgcttttttctctatttcatcccaaaattcatcaacattggcctgtaatgcaaacttatcctgtttcattggtatatttatagttaagtatgaaaataggcacaaactcaaaagaaagatgaatgcctgttgtaaacctatataaagtgttccaggctatcttggatgtgatatacagaatgaaaatgaaaaaaaatgaagccgacgcacaaatcgacgcaacgccaaaatagcttaacagttacgcgtagaggaagaaaggtcttggaatttaattttttaacacttttaagggattaagtactagctattactgctttttctgtctctccggattgattctttactcttttcatttatttgattggcacacaggtaatttagaatgtctgtagaacaacagaagaaaccgaaacaactaaaacaggcttctttgatgtccttttttggaaagaaaaaggaaaaatcagcacctacaattattaaaaaagatactaatgaaactatagattcaataacacctgataattcattgaatgatattgcccttaaaaatgatacaaatgatacctcaattcagaaaatatcaaatgaattcttacaaacacctaaatcattgaaaagaaaatcaacaaatgatttagatattcttaaaaagaatattgatgaaattagtgatgacaaaaatattgataacgaagtaactacttcaaataaagatattccatcgtctcctgtctctcgtagatctagaaaagttaattattcagaactatctgatgatgatgatgacgaggatgaaggtgaagaaggtattaagaaagtaaagaggagaagagtgattgcatgggatgatgcagacgatgatgattttgaaattgatttgaaagcagataaagcaaaggattctgatgatgatgatgatgatgatgatgaagatatggtagacacccgttcaagtaaagaagaattattagaattgacagataaaactacaattgatgataatgaccaccatgatgatgatgatgttgtcgtagatgtacgtcctgttaagaaacaaaaatccgtttctcctccttcaagaaccacttctaaaatatcaaatattttagcaaataaaccagtaatgaagagctccctaactccacagaacaaatttaacaaagaaaatgaagaacgttaccattggttggtcactgttaaagatgctgacggtcatttagaatctgatcctgattatgatccaagaactttatttattccacaatccgcttggttgaaatttactgcatttgaaaaacaatattggacaattaaaagtaaaatgtgggatactgtcgttttctttaaaaagggtaaattttttgaattatatgaaaaagatgcagatattgcacacacaaaatttgatttgaaactggcaggtacaggtagagctaatatgagattagcgggtgttccagagatgtcatttgattattgggctaaaagatttattaattcaggttataaagttgctaaagttgatcagaaggaatcattattagcaaaagaaattagacaaaagaatgatagttcatcatcatcaaaggaatctaaagttatccaaagagaattagaatacgttttaacttgtggtactttaattgatgaaaacttattaaatgatgaaatgtctaaatattgtctagcactgaaagaagttgttgattatgaaaataatactaagcattttggtgtctgttttgttgatgtttcaacaggtaatttccaaatactagaatttaaagatgatcttgaatgtacaaagcttgaaactttactatcacaaatcaatccaatggaaattttaatttcaaaaaatgaaatcgattcattaactttgagaattttgaaattcaattcaaatactaatgcatcctttaattttattagaccagaggaagaattttgggaccatgaaaagactgttgatgaactaagtaaattcaatacaattaatgaactgaaaacacctgaaattttgaaaaaatattatgaaactgaaaaatatcttgcattttcatcatttggtgcaattttctggtacttaagatctcttaaattagataataatattatttccatgggtaatttcagtgagtatgatccatttaataaaagtttattaagttccacgatgagattagatggtataacattacaaaatttagaaattttcaataattcatttgatcaatccgatagaggaacattattcaaacttctcaatagaggtttaacatctttcggtaaaagagaatttaaaaattggattattcatccattattgaacaaggatgcaattaatgatagactagattcagttgaactattacttgataataatgagttgaaagatttgattgaaagtaaattaaagaaaataattgatgttgaaagaatgttaactagaattcattctaagattttaaaaccaaaagattttgttaaagtaattgacagttttaagacaatttctggacttatcaatgaaatcaataaatttggtattgataatttgaagggtttgtttaaatcaattattgttaattttccaattttagaattagatgaattattagagaattggaatgataagtttgatagaaatttggccattaatgaaaatttgattgttccaaatccaggagtcgatgaagaatttgatgaaagtaatgctaaaatatctaacatagaatcacaactcaatgatttattacaggaatatagatcagcttataaatctaatgaaatttgctataaagatagtggtaaggaaatttatcttattgaaatacctacaaagttagtcaacaaaatcccaagagattggttacagatggcagcaactgctaaatgtaaaagatattggtcccctgaagttaaagctttagtcaaagaattaatggaattaaaagaactgcataaaatgatttgtgttaacctgaaagatagaatctatgagaattttgataaaagttactccaagtgtattaaaatcatttcaagtattggtaaaatagattgtttattatcgttaactagatcatctgaaatgatgggtttcccaatttgtcgtcctgaaatagttgaaaatgattattcatttattgatttcaaacaattgagacatcctgtttttgctgctggttcaggaatattgaatagtaaagattttataccaaatgatgttagtttaggacttggtaacaaagatagaattggattattaacaggtgctaatgctgctggtaaatcaacattattaagaatgacatgtattgctacaataatggcccaaatgggatgttttgtaccagccgaatccgctaaactgacaccagttgattctataatgacaagattaggtgcaaatgataatattatgcaaggtaaatccacattttttgttgaattattagaaacaaagaaaatgttagataatgcaacgccaaaatcgttagttattttagatgaattaggaagaggtggttcatcaagtgatggttttgccattgcggaagctgttttacatcattttgctactcatattcaatcgattggtttttttgcaacacattatggtaatttaggtgaatcttttcaaaactcacccaaaggttatacctttaagaatggctattttagttgattctgcttctaaaaagattacatttttatataaattggaaaagggaaaatctaatggttcatttggtatgcatgttgcaacaatgtgtggtatacctattgaaattgtcaataatgcagaaattgcagcaaataaatgggaacatacatcaaaattaaacaaaatgaaaaatatcaaacaagatcatggtattccattaggattagaaagtgattttagttggtatagtcaaaataaaactgggttgaatgtcttcggagagaaatttaccaaggaatcactaaagagtgtatttaagatgattgatagcttataatagagatagtttgtatagtattacgtaataaatgaaatgtagatcaaaaatatagaagacatgttttttttttcagctaaggtttgacactttgccattaaagatctgagccgtttcgtttgcttttgacatcgatgtccaacatatcattgagctttattgatgatataacggaatcatgagtcagaaatagaaaatgttaatagtgatattgaaattatagatgaagttgtgaaaagaaagagaactttggaagattcaaatattgcaaaggttttgaaaaaaagtaaacttgatccaattgaagatatgtgggtgaatgaatacacaccagaaaagatatctgatgtttgtgttcataagaagaaaataaaagatttggagactgaaatacaaaatttgataaataagcgtgacggaacaaggatattagttgtttctgggcctagtggatgtggaaaaagtacaagtgttaaaatacttgctaagtcaatgatggaaacaagattaaatgctatacgacgaatgatgatgagtagtgaaattggtgataaaatttatgacaaaaataatgattatattgttgaattcaatattttaaaggaatctaggttaggtaactccactgtacgttattttggtgaatttttaagtcaatgtaaattactaactggtataaatgagaagtgtgtcattgttgaagaactaccaaatttatttcataaagagacacttttttattttagaaaagccatgttagactggctaaatactgattcacaatatagattaccgccattgatattttgtatcagtgaatatgacattgcaaatgatgatagtaattggaatggtggatttacattggataatacattcaaagttgaaactgtacttggatatgaggttatgaaatatttagataatgggttgaggagaatcctgtttaacaaagttgcagtaagtttcataaaaaatgccataatacgaatcacacaattacgaaggataaagagagatagtattgttaataataaaataactgagattagtaaattaggtgatttaaggaatgcaataaatactttcgagttttggtataagtttcagtatggtaaagatgggtttggtgaaggtgaagatattgaaggtaaaggtggagttttagatattttccattcaattggtaaagtaatatatgggacaaaacacgaagaagaagaatgggttaattttcaaaaacgacataatgttaaattgctaaatacaacacaggttagtaaatatgctattagtgcagataccattagtagtgagataatgagtgatgtcaatggattcaatttaagtgttcttgagaactatcgaacatttaaatccgcccatttgtgaagaattaaataaaatgatggatataatgagtttaagtgataatatgattacaatgagtaagggaaagggagatataatgaaaaatattgcattttatgattgttatgggttacggaatgtttttgataagatgaaaggtaaaggtagtagtgaaaagtattcaagaaaaatgaatttttcaagagataagaaattaaatagtagaaggaataaaacaattaaagacattcaagagtttcaagaaatttatcattctagggggatattttgtagtgataatattgctaatttgattgatgggtattatgtttcaattataatgaacagttttaaattacgtatgaagatttataataaaattggggatctgaaagttggtaaaattgaaagagttggaggggaatttaataacacaattgctgttagtgataaattagttgacgaaattgctgatgctgttgaagaggttccagtaggaggcattaaagatttgaaattgttacaagatgcttattttggtgcagttgtggctggagatgatgaagatgatggtgaagggtacgaaatagattctgatccgattgaaaattctgatgaatgtagtgaaacggatcatatacaaaataaagatgacgatgatgatgaatttagtgatgattcattagtattagagatgtttgagtaattaaacatatacgtgtgtaaatataatataaaagcttatttactatttattattattatttaaaaatttattataaagaattaattaattagcagattcttgaagagcatgttcaaagaattgatcatcatcactcaagttttccttaataatatctaaaccaccttggaagacaccattaatatataattgagggaaagttggccaatcactgaaagcttttaaaccttgtcttacggaatcatccttaagtatatcaaagaatccaaatcgtacttgatgttctcttaagattgcaatcatttgtcttgaaaacccacattgtggagcagatggagtacctttcataaataacattattggagcagcagttgttaatttttctaatcttgcgtttaattgctcaggagattcattagattcttcatgaatagctgttgtattttgatttgtagtaacatttgaattggtatttgaattattatttgaaggttcttgtgatgaagatggagatgatttaaattgatctaaagcagtaacaaattcttttggatcagcacctgttaattcttttaagattgtaccattttgaataagaacaaaatacggaactgcagttatatcgaataaatcagatatttctgggaatgtatcagcattaattgtcaggaaagaaattgaattatattcagcagatgaagataaagtatcaataactttattcatttgaatacaaggtgatgcccatggagtatggaaatataaagcaattaatttatctttaactgaagttaattctgagaattggtctttacttgatatttcaattaaggtcattgttggtttcttttgttaaagttttttgttgttaaaaagaaaaagatgatgatggttaaagatgtaaatttagatgatttataataaattaatggttttacggatttaaacataaattttaagtgaatttttcaaaaatgagaaaaacatgctcgaattgggtatgctgacagataggatctcatgtgattggctctagaatcacactgtggcttgggtattactaattataattttgttagtaaaggtgtatacaaatagaatattgtatcaacatgattttagagagtatataaactaaacataagtgtgaaaacaacatagtaactgacaagcaactaaaacgtatatccagtagggtgtttaatattcggaaaagatgcctcattgggtgaaacacgataagaattttttaactatggtgaaaattagcgataagcattcttaaagtggttatatccgcaaactgcgacaatcctgacagagggtaatgggtatataaagacctggttgttctcttgtaatgtactctagagataaaggtttgttcatcaattgaacagtttgttacatagtatatacatatagaaaatggttaaagttatttcatgggaagattgtggattacccgttgcatcaaagattttagatgctgcaacaattacaaaatctggtttaatttacacttcaggatctgttggtatgtcagctgatggtacaattcctgaaagtgttgaagaacaaactgaaatttcaatcaagaatttagaaattgtcttaaaggctgctggcagttcattaaacagtgttgttaaagctttagtctttgttagcgacgcgtcttatgttccattagttaatggtgtttatagtaagtatttcataactaaaccatcaagatcttgtgttgttgctgcaatgacttcaccagctttcaaagttgaaattgaacttgttgcagaacttgaataaatatatatatatatatatatatatatatatatacaaaagtaaaaaattatataacattataatattcattattatcttcttgatcataataaaattcttcagttggctttttacgattatttgtatcttcctctcttggtacaatatcgattaaaaaatcaaacatatcagatttttgtaatgcagctgcaatatcagatttttgtaatgtacgtcgtttattttcctctgcatgaatccaagctctcattgtaagttcagtaatgaaaatatcacaaccttttgcaaataaaattggtgcttcagctgatatcattttaacttcatcatcagttttcataacctttttaattctagctaatggtaaatgatgatttttaaaatcatgatcatccctctctattgcatcaatagtattttgccaatattgcatcatcatatttttatatttaccaactaatccttgtccaacattagcaaatgcacctgatggattttcattatcatcctcaatatcttcttcatcttcgtcttcttcgtcttcttcctcttcatcatcctcgtcatcatcttcgtcatcatcttcgtcatcatcttcttgttcatcaacctgtacgtctcctacaagatcatcaggaccatgttcatcattactcagtccttcaactgcttcattaagaatattatcattatcatcatcatcatcactatcattatcatttccaatatttcttaaatcttctctcagatgatctatattatctatatcattttcattaacatcaacacctacatcaacgtcaacatttacgttcacattaacatccacaccatctactccattctctaattcgtcaatatctcgatcttcttctcggatatccattttactaaatgaaatttgttgataaattaatgatgataataatcaaacagtgactaagtttcacttcaagtccatgaaagaaatttttaaattccgaaaacagcgaaattatcgacataatagattctagtttattgatggattgttctttctggtggagtagtgtagcaatattttaccaagttgttttgtaatgaaaataacagtgttttatgtgaataattaataaaagtaccgatattttgataaaactatcataaatacataccactgaatacttacgtaagatttgacatacttacatatcaagcaaatggtagcaatattacaagcgtatcgttaaaattgaattaaagtttgaaaagtgtatttgaagagtaggaaagacatgctatacatctttatatgtacactggttcattcttaagaaatataatctatgactttccttcaatttaaccaattttgaattactattaataacattatcataattattataatcatcataatcatcataatcatcatcattaagatcctcaatattcatcacatttgctggggattttctcaaccttatttgtgaattatgcattggtaaaccatttttatcaaaataaacatcgattccacaatgtttatatttcatttgtcttgtaggtaataaggtaacgtaatctcccctatgagaaactctaaagtaggaaggagtattttttgaatgataactattgtctagattattataattattatcagtattccaaatatcatccatccaagatgcaaaaaaggtattaccaattttaggtgcaccaaaagtaataactgttggatttaaacctaatggtaaacattcatttgcaagaactggagcgatagcacctcctagtgaatgaccagttattataattttataattaggattttcttgtgataagtttaataaatcattaaataaattatcataaatttctttggctccatcgtaaaaacctttatgaattgtacacccattgcaagaattattatatttataccattttttccatcctttctttctttgatttaaaggatgataaggaattggaaaaaatgttaaattcaataaccattcttcatttgatgttgtaccttttaaacttaaaataatttcatttgaattattatcttgaattaaaatacctgaaactttaccatgataaatttttataatttgaatattaatttctgaatcttcacataatttacaagtacaagcatttttcaattcacctaatgaaattgaatcttctttaattgagtaagatactgctgcatattttgcagctctaaacattgaattaaaaagattatcagataatgaatttgatgatattattgtggaattgataaataatgcatttataaacgataaaaaaaagagtattgttaatgagtgtttaagtaattgcatttgttaaaactttttgttctaagaggaagaagaaggaaaagggggataaaaaaaataaaagttacaaatagaaaattttaagagtagttatagaaattagtgttttcatatcaaaacagaatagaataaaatagaaaataattgtaattgtaatggagattgaaattggaatagaacatgaaaaaagttgagccccctaataaatctaatgattacgtaaagcttatcttaatacatattataagaaaaacacttacataagaaataaaatatttgaaaacccgatagcaactttttaataatatatacaattaactaatatcatcaaaggaatatgccacatccatttgaatcatttactccaagtacaacagctagaggaccaatatataatgcaccagaagatttattagagattgaagttacaaatccaataacacatggacaaccaccacaatatacagattatgagataacaacacgtactaatatacctgcatttattggaaaaggtaataataataatggtaatacaccatattacattaacaactaggaaaagatattcagaatttgttaaattaagacaacaattaagtgatagacatccacatatttcattaccaacattaccaccacctagtacaatgtttaattacagtaaaaggttcaatagtgatttcatagacgatcgacgcatgggattggaaattttcctaacagcaagttgcctctcatccacttttacagaaggagaatgacgttcttatctcttttcttaaacattaaatgggtgagtgagtgagtgggtcgatcgacctgtaagttaagtcatttattatacggaatccgcaccccggagatgcatggggtgatatttttataaaattacataactatagtaaatatactacatactatactaatctctattgttaaaatattaaacaccccctcatttagaaatagaaaccccctatataaatcatttacattgcggaccagttaatctccgtaatggcatgtgatacttactttaccttacgtttaccttaattttaccttaattttaccttattatcacttgccgtcatccgataaaatacattattaacacatgttttaacttgttgacatcactttatctctccatttacattttatttatctcaattttaccatttatccttaaatctctttaattttatataagcttattttatgtctataaaaagaactataattcctacttttattcaaaaaataattattctttacttttcatattattctctatactatttatttcttactttcctttaaacaaaaagaaattaatattctatattaattaattaaaataattatgtctgaaacttacgaaattccaaaaactcaaaaaggttgtatcttctatgaaaatggtggtccaattgaatataaagatattcctgttccaactccaaaaccaactgaaattttaattaaagttttatattcaggtgtttgtcatactgatttacatgcttggaaaggtgattggcctttagatgttaaattacctttagttggtggtcatgaaggtgcaggtattgttgttgcaaaaggtgaaaatgttacatcttttgaaattggtgattatgctggtattaaatggttaaatggttcttgtatgggttgtgaattctgtatgcaaggtgctgaaccaaattgtgctaaggctgatttatcaggttatactcatgatggttcattccaacaatatgcaactgctgatgcaattcaagctgctcatattccaaaagatgcagatttagctggtgttgcaccaattttatgtgccggtgttactgtttataaagctttgaaaaactgctgatttaagagcaggtcaatgggttgcaatttctggtgctggtggtggattaggttcattagcaattcaatatgcaaaggcaatgggtttaagagttttagcaattgatggtggtgatgataaaaaggaactttgtaaatctttaggtgcagaatattttgttgattttactaaatcaaaggatgttgttaaagaaattattgaagcaactgaaggtggtgctcatggtgttattaatgtttcagtctctgaagctgcaatttctcaatcttgtcaatatgcaagagttttaggtaaagttgtccttgttggtttaccagctggtgctcaagttaaaactggtgtctttgaagcagttgttaaatcaattgaaattaaaggttcctatgttggtaatagagaagatactgctgaagctctggatttctatacaagaggtttagtctcttctcctttcaaagttgttggtttatctgaattacctaatgtctttgaacttatggctcaaggtaagattttaggtagatatgtcttagatacatcaaaataattttataactaatgagtttttttttctacttatataacaatataacaataatgaatacgattaaatttaaacttaactataattaaatgaagaatgtaatactaagtatcgaaaattagataatatttttctcaacatgaaaaccaacccctcatcattatttttttatcagatttcatacacctacttttcttttcccaagacactacagaaacatggttgaattaaacgacgatacaaagttaacgtttcgtaaaattgatgatccaaatgatacatattttgaacgtatattaaaatataatttccgatactcatcaccaaatttatttatttggggtcctattagctccagctcatgatgctttattaccaagaactataatggcaagattacaagtttcacttggtataatattaattggtgcaacattccgtagattcccatcaacaacgggtaaattaaatagaattttcagtagaggtacaagttttttagctggtaatgcattattaattacaggtattagagaaatttcattttataatgatccattatcaaatcctttatatattgaaattcaattagctagagaattatctgctttaaatcctgataataatggtaaaccaaataagggtaattattggtttggtccaaagaattttatgccaatgacaaataaacaatattggcaaatggtttattcattagaagttaatgaaattttagctgatcaatatcttaattgtgatttaattaatcaatataataaattaattgaaaataaattttctggtgaattaataaattcaaaaaatgatgaattaacgaatagaatatctgatattataaattctaaatcagatttaaaaacagaaactaaagttcatccaaatactttaattaattcaaatgttaaattattcaatgaaaaactatcgaaaatttggattaaagatggtgttaattctaaaactttattattttggtcacaaaataatccattcgatacattacaattaatggaatataaagattattattcttatattttcccaagacttaaatttcaaaaaaaagaatagtaaaaagtaaatagcaatgtaatttgttatatattatatcatatgtaaataaaaaactgaataatatagttaataattattaatatagtaaaaatctaaatcctagtaatcctaatatcttctgttacctaatggagcattattactaccactacttctattaccaccaccattaccaccaaatctacctctaccacctctaccaccaccatatctacctctaccacctctaccacctctaccattaccacctctattaccccattgtctcttatctaatgcttgtaattctggtgtaacttcttgttttgcttcacttaaaataacaattaaatcatgagcttgatttgcattatctcttgtgaaaagtgtaattgctgtaccctttgcaccagctctaccagttctaccaattctatgaacataatcttcaatattacttggcatatcaaaattaataacacatgtaacacccttgacatctataataaaaaattaatcaaattaattaaatgttagtattttgtttcttatctttttaattcattttacaatcattaatactttactttctacaattttttacgggcttatttttaaagagatcaattaaaattacttctctaaaataaattttccttcattttttccaaattaattatattagttaattttaaataatttcattatacgtaagatattgcaaaacttataaaagattcattccctcaggcgacccccaatttgaatgcaatataataccttttctaaaattattctttcataaactaatatgttctcattgatactaattaaactttttttcaacgaaccccatattcgtttactgtttgttagtttaattagctccacttcctttggaagaaaaaaaaatatttcttcaaaaaaaaaaaaaaaagaaaaaaagaaaaaaaaagaaagaaaaaaaacattcctattcttaattcttattcttatttcttatttcattcttgtttgtctattatctgatcccactctaaaaactaagcctgtaataatttatccttctattggaatgattgaatattgaaaaaaaaaattcttcaaagaccactctttgatatatttcaatattcatcaataaaatctgttagtaggtagtaaaataaaaataaaatcctaattgtttaatacataccaatacctcttgcagcaacatcagttgcacacataattggagatttacctgatctaaattcagatagaacccaatctctttctctttgttctttatcaccatgaattgctaatgcaggccaaccttcacttcttaaataacttgttaattcatcacaatttctctttgttgaagcaaagatgataatttttgaatcttcagttttcatttcatcttcaatatatttagcaattttatctcttttttcaaaatcagttgtaacttcaacaatttgtttaatattatgtgaagcacttaattctaatgaaccaacattaacttgaatataatcattaagataatctctaactaaaccttgaacagattttggccaagttgcagaccacattaaagtttgtctatcaggtctaatttgatcaacaatttttctaatttgaggttcaaaacccatatctaacattctatcagcttcatctaaaactaaataagtaactcttcttaaattagttttaccactttctaacatatctaataatctaccaggagttgcaatacaaatttcaacacctcttgataaatctctaatttgttgaccttttggaacaccaccatagacacaagtatttctaattcttgaagttttaccaaatttagaacattcttgttgaatttgaactgctaattctcttgttggagctaaaactaaaacaattggaccatcaccaggttttaataaaggttgtgcattaatatgaacaattgcaggtaaacaatatgataaagttttacctgaaccagttgctgcaataccaaccatatttctacctgataaagccattggccaaccttgacattgaataccagttggtttttcaaaaccttcagctaaaacttcctttaaaacataatctgggaaaccagcttcagtaaaacttgtaattggtcttggaatatcatgaccttgaattgtcatttcattttgatttctgaaatcttcaatttccttttcacttctagctgtaacagctggatcttccttatagaaatttttttcgaatgttggtaatgaaatattattccaatcttgcttttgtaaattatcacctaattctctatcttctctactaaatgagcctctaccacctctattgaatccaccaccattattataaccaccattgttataaccaccaccatttctatcatctctaccaaatctacttctatcaccaccaccgtatgatctataagagcctctgttatcgttttcgtaacccattgttaatataattcgatttgctcaaatgaaataataaaaaaaatagtataccctagataataaaaaaaagcaggggaaaacctttcttttataaatgaagaaaaattttttcacgtatcaatagataaaaaataaaattttttctttatgggaaaaaagaaatttattacgtaagttttagtattagcattggtattactataaggttttgtatcattttagtaactaaattttgatcagttgcaggataaagtacagtaattaattatatctataaagtttatagtttatctagagaatattaatcattaaatagtaaatagtaagtaatagtattcattgaaaaacaaaatttatggttcttccgtactataatctttatttgcaacttttgtactaaaaacttcttcaacatgagaacataaattacttaaatcctctaaacctttatgaaatgcttcaactgctgtcattttaccataagtttgaattctgatatttaatttattttcacttggatgtggaattgaataaccacaaaattcaacatcttcattcttcataatcatgtatcgtaatgcattacctaatgtatgatcttcatcaattatttgaaatgatgctgcaaatccatcacttgttgctcctggtaacaattgaattttacttgtatcaactgctaattctagattttcttcattatttgcttcattcatttcaatatcattagttggtgcaataactggtttactctctgtatctgccattatgtatgtttattatattctattgtgtttattctacaatgttacaacaagatcaaaatacaattattaattctttacaaatttttcaatgccaaaatagaattaaataaaatgaaataaattttatcctcgcaaatttaataataaatacatctctcggaattttcattactatacagattatttatagagcataatatatcatttagtcttaccacgacctctgatacctttattcaagtttttatataaatcagaaaagtaattcaacagttctctctcattctctggtaagtcatcaattgattgattattttcacccatctgtgcaagtttactaaataacatattaattgtattaaggtgaaatctattttgatgtgcctttaaattacctaattgtgtgaaacctttattacaaccttcaaatttacaaataaatggtttgaaattttcatgagttgaataatgtgcctgtaaattacctttcctactaaaacttttctcacaaatttcacatttaaatggtttctcccctgtatgtaatctcatatgtgttcttaaattaccaccttgtgtaaaccttttatcacaatattcacatttatatggtttaactcccatatgtgatctaagatgaacatctaagtgtgtagtttgggtaaattttttatgacaaaatttacattcataatttttggatcttttaattgctgttttctcaactcctccaattaattcaacgggatttggtagaattttattacttatatgtgccccaatttcttctaaattatctttgatatctttattattatcattggtattagctgtatcattattcgaatcattggtattataattattttcactcttattgttattgttatctttactgtgatctttatcttcatcaatgtttccgcaaacaccattttttctagcttgaataatcaacataagttgatcaacttttgttgcaccaactagtggtctaccatcatcacgttttaatgtttctggtaaattagcaattgcttcaatttcattcatcgttggtataatcttttcaaccttcttctttttattgctattaatattatcattatcatcgacattatctgatgatttcttcttatccctctcccttcgtttattattcttggtcgattctttatctttaaaagagtttgtcttattattacgtttaccttttttaataattggtgtttttccagtttcttcaatcttaacattattctcaatatcaccatcttttttgtcatcaacttccaacattttagtatggtagatatcaactggagttccaacttctgtaattggtgtagctattcttacaccatttgatttaatattttgtatctgtggtggttgctgattttgtaaatttggttgttgttgctgttgttgctgttgttgttgttgctgctgttgttgttgttgttgaatcatataatgttgttgttgttgtaataattgatattgtaatgattgttcttgttgatattgttggtattgttgttgttgttgcataaataaatgaggatatgcttgatgttgtaatgttaatggatatggttgtttcatattattattatcaatataaactatttgtggtacttgttgtgataaattttcaggtggtatactttgctttggatcaatttcattgttatatgggaaaaaatattggttcaatgagttactactatttcttgatcctactcctaatggtaattgaaatattgaactatttctagattttggtctacttgttggatttttaaaatcatttgatatactatttgaccctggttgttgttgttgttgttgtttggatattatttgcaatggatcaagtaattcattattgctatctcttttcaaaaatgtgtcaatttcaccggcagtataatcatttgggaaataagcagctgatggaaatcttttgaagaaaaaactattttgtcttgaatcattagggtgattacctaaaatatccaatgaggggtttgaaataattgaatttttattaatatttgatgaagagttactattacttgtgattgaacttttatttagattagaatttgtatttgtacttgtacttggatttgtactagtactagaaactacatttaaatttgaatttaaattcgatggaattttggatctatgagattttaaattagtttgtgcaataaaaggatctagttgttcacttaatcttctatttgatatcagatgatctgttgtaaaaggttgagcaaatccaaaattacttaaactaccccggttggatacagatgatgaattatgatttaatggaattgcaaaataatcttttggtaattcttgataatttgatgaatccgtgtatgtataaccattgttgttattattacttatattattcagattagtttgatcaaatgaaaatcttggcaatgatgaagagttacttaatacagctgagaatgaaccattggagtttattgttgtattagtatttgaaattgtatgtgagttggaattagatgcagaatttgatcctggtataggtggtggtatagtattggtatttgtgttggcattattgttattattgttattgttctctgtgttgacgttgttattggtggtagtatttgtattggaattggaactggaattggtattggtattggtattggtattggtattggtattggtattggtattggtattattattgttattatttcctgtactattacttctattattattattcaaaccggtggatgtcataaaaagattcaaatcttgtggggtatttggcatagaggatatatcagataatggtaaaacggaattccttcgacttacaaattgattatttggatcttcaaaaattgaattaagtcttgttataggttgattatttgtataagaataaatcatttgattattttgatttgtaaaaggtattgaattattgatttgattatacagatgtgatggtggaggtggatgtgcaaatacttgagctgaatttgataatcgtgtgctattatttgttgtgtttaaattatttgttgtagaactagtacttagagtattatcactattttgtttatgaatattattattattgttgttattattattattgtggttaccattgtttgagccaactgtttttgaattactattatcaggattgatgttattttttattttatttgaatctgtattgtttgatttagaaatgatatctcgattattgtttaaagccattctttcagatgtgtttagtttatcattattgtcattgctatcatttctactattatcactattatttgatgaattaactgcaaaattactatcagttattaatcgtatatggtcactttttatttcatggtttttaggtacattattattattattatttttattattattactattattattattattattattattatgagtaataatatgacttgtatcatttgaattatctttattagatattatattatcaataaggtcattattgttagtgatattattatttaagtttgtattattatcgttattattagtattcttggtatcgtagattgaatctttgtctgaagaattatttgttttctgttcatgttttgtaagtaagtgtggattcaacattatcttagtattatattgattcaatatttatatcagggtaataacatagaaatcttagatatttttcagaaatatacagagatgaaatattgtgtcagggatgggatgggggtgtgattaaattaaaatttagattcaaattttatcagtagtagtagaattatttgaaataattatatgatataacgataatattttataagtcgtttaaaatatcagttataaaattaacgatgaaggggaatagaaaaagaaagaaaggaaatagtaaagaagcaaatgataaatgttagaaaaagaaactcaaaacaatttgatgatgatggatagtgcaaaagtttgaaagtaaatttaatggttacaatagtttccacaatatatgagacgaagaataattttgtaaagtttacctgtagttgtggtgaataataataacagtaataataacaaaattgatggacataaatagccatcaatgggttcacatcagttgtgaataattattatacattaattttattattattacaattatatttagccataaaatgagcttgaaatagaacaatttaaagaaatgggcacggtcaaatatatgctttacagagatattatgtttatcaaatatacggtgtttatttaataagtgggatgtgtagatgtattaccctgtgtacagagcaatatcgatgatttacaatatattacatcgaaatattaatatacagggaatgtctgaaaagaggataatcatgagtataaggaataaatttttttccattggtaaaaggttaacaatgcttctttccatttaaacaatagattctattgttctcttaatgtcttattagtacagtgtattactcaatcgattacttaattacttaattaattacctaatcatttacttaattgcttgtttacttaagtgattcattctctataattcatttaaaaccctcattttctgcctctccggtgattcattggattatacttcaagtatactttctatagttactatcctattattaattaaaattagttatatacacacattacaattattacaaatagcccctgtggcattatcccctatatacacaaagcaacaatcaaacaatcaccaattatcttacataaacaatacgataataataataataaaaattattatttaaatacgctaagatttcctattatagtaatgcctatctccaacatgatgtcttagtaataattaattagtaacttattatacaaggactccgaacttcatgcatcacatgacccctatttgttagcttcctcatcccatgcactaccaaaaagcagctcatctaacataccaataccttcagaacttgaaaatctactaggtaattcaattgttgtactctcaactatattattaccgtttccattattctcagtctcccctccactcaaaacatcattagttccatcatcagataatacattgatgggattcttatctgtctcactttgataaactgtagataatcctgatggaattgcattacttcttgtagttttctgattattattgttactagtctcgttattattactattttcagcaccgctattattattgttgttcatttgatcaaattttctatttttctctgataatataccattatcacccgtatttgatccatcattcatttgaccttctttcacatacgaaaataatcctagtgatggttcaaataaattatctcctccatttttatcttgtctattatcactatccctaacttctccatcattattactattattattcaaatcattattaagcatatatggtggtaagaatctaccaaagatcttcatatctaattgatccattggtccttgaacatatttatattctgtaatatcattaaatccattttgcttttcattcttcttagtaacattttcaccactgttattactattataattaatatcaactatatcatttaaatcaatatcattaaaatccatattcatgttcatattcactggaatattcatactcatattattatcattgttagtattaccagtattattcatatttaaatcaatatcattaatatccatattcatttgcatattgacattattaacgttcatattattcatatccatattacccataccataatataaatgactcatattacttggatcaagtattggacttatggatttaccactctccattccaagaattggttcacttggctttgtatatttaacaggagtagtcatattagtatttttgttagtaggggtttttgcattgatcttagtattagcattggcattcttaggtgttattgattctttattattagtattattatcccatttatttatattgttagatggtgatacagaagttgatgtattgttattagtattgttattattagttttgccattattgttatagctatttttaccgctacttccagttcttgcagttttcctattcagttgttcaaatactgcatttaatatattatatgttcttctagctgccatactactatcttttaaaatatctaaaacttttttacccttctctgcatctttcttaattgcaatatattcaaaatctaatttaccgtttttatttaatgatggtgcaaaatgaacataataaactaaacatgcaactgagaaaaaaattgtataaattgaaaaccagtatgacccacttaacatatttttatcaatcatatcctctgctaatttaacaacaactcttgcaacattaatacaatttttagcattttcaatacatgttaaatcattatttgaattactcttaaaattgcttgagatataatgaataaaaggtctatataatataatcttaacatgcaaatatgatatatgtaataatctattggctttgatatattcttgtggtggttcaattcctggtttcagttcaattggtaaactattcatccattcttgtaatttaagttctaaatcataaacaaaattatttctaattgattcatgtttagtcttattattattaccattggtattatcatcaccatcatcaatatcttcatgaatatttagtcttttcttaggtttaattggataaagtttagtaacaacttctttcattaaaaatattaatctagtatgtgcatttgcaatacctgaacttgataatctatcattttgtttatcatatctataacatgtaaccgttatattttcatcgtctaattcttctggtaaatcttgatcaaagtcatcagaactaatagttctaggtaatcctaacattgtgttaacataaatatccattttataaattgtccagaataatctttttctaatctctaattcaattggattaaatggataatccaatttcctatgcagtccttctcttaatgctgctcttaaggcaattccgatatatgcataacatgttgaaagtcttgccgaacattgtaaaaagataatcaacataacaatcgtttgaataccgtaagtatccctagtatctgtaatatcaattagtttacgagccgcaataaaatatttataaccttcatcatcaaagtctttttcttcaataaattcattatattattattattattgttaatatttttcattattattaccattaatattattgttttcattatttttattattatttttaaattttgaatctgttgtatttctatcacttttataaaacagagcaccacacgccataactgaataaaccaatggtaagaatctttgttgtttattagtatattgagttggatcagtatcatataattcatttaaatcttcaataaatgcaactctatgataaaatctaaacaggacacaagcattttcccatgttttagtaattaaatcaagtgcaacctctctcgatggtaaaataattttaatttctctacccattgttgattcgattgaaccatcgatatcttgttgtagattatttactgtggatgctctcttaggtaatgaaattgacggggatcattgatttgttgttgttgttgttgtgatgatggtgattgagattgtatttgaggttttaattgttgaggttgagaaactgttatttgattaggtggtaatttagttattggaataactggtaatggtatatcaggtaatgaatcataagttttagcaatttgtttacttgtcggtcttgaagcatatttaccagaatctcttaatttattcaatgcggacattaatttcattggattaattggtttaggattatcattaagatccgttaatttgatttcaggtaaaagtctatgtaatatatcatcgtataattttaaacgatctgttaatttagagaataattcaggatttgaggaagcaagtaaagaaaccgttgatgaattgaatctatccattgtattactactaacatcagatggtggttcatttgttagtgtattcactgattttagtataacttgtggattagaattatttgagggattattatttgtaggtgttgtacttcgattatttggacccttgaattgagtttcttcctttttaataatggttcccttccttttggatttattaggttgatcatatgtacattcataattataaacagtacaatgaatacaaggtaaatcacctgaacattttattttcaattttctacaacgatcacaagctctgacaactcttctccttttctgtgtattattagattgtaaatattccggtaacattatcatctttggaggatcctttgatttaataggtaatgaattcagtggatctaatgatgatggtggttgttgttgttgattcattactaaatgtgacgaagataattctaatttgacatgtttatttaatgttgaagttgagcttaaagattgtgtagcttgttgtatcggcacctgttgctgttgttgtgcatcttcctcattctgtacctttctcttcgccatattataccttatgcagttgacttattcttctctaaactaaataatataatcactgaatttattaatgaatcatacaagtgttaatggtaataatagatcggaattcgatcatagtaaattttcaactaaaattcggacatcggttccgccatttccacgaaccgctattggattctttctaaggtataggtatagatgtttatatgagttggggggtggaggattactctacgattcgtatatataggtaggatatactgtattttatatatatggagtaagctattgcagcttttctcttaaatgtataaaccattggggcagaagtcgttcctgaggaatttgaactgatatagtggtaggaagtggtatattacctgaacaaccaccacgtaaaacttgagttctatcagtacgtggttgatacatggtccatttaagacttttcttatgagattcttttgttctattaaatgaatccagtgcattgggaagttgattctttttacgatctttatgtttcttctctgccattttcaataaattcatgggcacctgtggtgatgtcgatatagataatcgatccattgattctgtagttgattgttccttattagaggatccaataggaatagctaatgagtttgttgagctctgatcgtcagaagcaatgttcatattggatgttgaccttgttgaagttgatgaatcacttgatactgactccgtcctctcaaatattattggaactttcacatcctctgtgtcttcaatgtgaggaatcagttccacattgattaattcaagaaatatttcaactttataactcattcttctagcaaatagtttatattcattaaatatactactgtaactccatcgcagaatacatcttaaaacaccaattataacatcacttgtatccattatcaaacaattatgattttccttgtttaacattatcatgaatgctttggaaataatacttggtcttaaaatcatccattcttgaaattttacattgttattggaaaatgtattaatagttttattattatcattattagatgctgtaatgctagtattatcattcgttataatattaccatttgcaccctctccaccttcttcctcctgtaatatacttgaattcacaatatgatgtaactgtacattattttcctccatatactgtcgtactgcacgtggaggtttctcctcgttgatccacacaatcgatttaagttcaagagatttaagaaacggtatattgatcccatctactctagaacttctgtatataccctcctccaccaatgcaaaatgttcaggaggtactaacatggtgatatatcctataagagagctattgtaaagagaataaactccaaagacctgtacaacccatataataatttggagacttccaatttaccataataaaatttcacaagagactcgcttgctcagcagtatagaattcacatgtgtttggcctttttgttgactgtttaccatttacatacgttttcttatctggaattttataggataacactggcaaatgagtgggaatctcaatatagcattcattcatcctgatttgggaattggaggagctgaaagattgattgttgatgccgcaatggcattacaatctgctaataataaagtttccatctatacctcacattgtgatccaactcactgctttgaagaaattaaggataattcattaaaggttacagtttatggtgatttcttaccaactggtatcaatggtaaattcaaaattatatttgcattccttagacaactctatttgacaactaaactgatattaacactgaaaatttatcaatatgacataatcattttagatcaattatcctattgtattccgttgttacatttatttgcatggaatactaaaatcttattctattgtcattttcctgataaattacttgcttctcatggatcacttattagaaaaatatatagatttttgtttgatttgatagaagaagtttcaacatcttattctgacaaaattcttgttaattcacaatttacaaaatcaattgtaagaaaaacttttactcatatacaggctgaaaagtttagaagttgtctatccatgtgtttcagtaagtgataaaaataccactagttccacatacccattgaaaaatatcctaaacgaaaattcattctttttatctattaatagatttgaaagaaaaaagaatattcaacttgccattgaatcattctctcaatatattattaaaactaatgataaatctcaatctattataattgcaggaggttacgataaaattgttgatgaaaatgttcgatatcataatgaactacaaaaactagtgtgatgatttaaaactttcacatattacaattaactggtaaagatttaaataattttaaaccattaccaaatgaaactgcaaaagttatctttttaacatcaatatcaacagatttaaaagattcccttattgaacaatgcgatttacttttatatactccttcaaatgagcattttggtattgttccattagaggcaatgcgtatgggtaaattagtattagctgataatactggtggtccattagagacaattgttaattactttgatgataaaaatgcatttactggatttactgttgcttcaaattttagtaaatgggaagatatacttgaatttgtcaaaggtttgtcgaatgatgaactgactaaaatatctgaaagatgtaaggcaagagttgatgaaaaattctcattcaattcattgaagattcaattagttaaagtttgtaatgaattattagaacaacctacagatacatctcaattaattattacacatttattagttcctattatttcggcaggtttaatattatacttatataaagttatatttaattaaaattaacttattcagtatcagaaactattgcttcttcagtatttataccattttgttcaacactatttatcacttcttgtaatttctttttagttattgggtattcaatcatataatcgtatatacctgtattttgtgaatctttataatatgatgttagagcaaccattgttgcattagtatttaaagaacttgtatttctgattaatttaactaaatctaatgaattaagcctttgagattctgttgatgtgaaaataatgtcaaaaatgatattaccactactcagtttaattagttctgatccacttgcacatgaaaatacaatacatcctaattgttttagatcatttgtaatagaatatctatgaattggaattggctcaaataataaaactgttaaagtaggtaatgttgacttcatatttctaaaattatgtggaactttggtagatgatgatgatgaaaccctatttcttgatgcattggatttacgtatcttggaaataattgagtttctttcttcattatctgatgatgatggagaaaaatcactcagtgtacgagtgaaagatttggtcaaaatgtgaagagcaggacttgacaaactatctttcttattgagtttattattggtagtagaacttgacgaaactgagtttttgtttgaaagttgacctgtatttgatttattattattggtattggtatttccactattagaggtctccagattcaaacttgcaaatttattgacaggagacgggataaatgataaaattggtgattttcagattacctgtaatcaattgagaatttggtgatgatgagcgcttatgagaagttggcatttgaggagcacgacctcttgaaacaccagtcagtggagttgctggtgctgatccaacaccatatccagaacttgaagatccagtggattgaggaacatatccaccttcggatgatgcaattgatgaaatactatttcgatgttctaaatgttcagattttaacctattaattgcatccttgttctgtttttctaaaaccattaaatttctaaattgaaatgatccaaattcggaactactaccagcatcgtttaatcgtgaactacgtctttctcttggtgatgctaatgcatgagtctttgagaaactttgtcgtggtgattcaatagtgaatgatgaactagaattagaattacttgttacatctcttctcatcttgtaacggttatcattcatataattagtcgtgggacaaaaaatttcttctttcctcttcttcatcttcttcttcattctctaacacttcttcatcttcatctccaacagcaatatcatcatctttgataaaatcatcttctccagcctccatttcaagatcaccagtatatccattatctttttcatttgctggctttgcataatcatcaggagagtttaaattatcgtcatcgacgggaaatgaattcatagttgcacctcttgcatcaaaataatcggttgactcaggatcttcaacttctggtacaaatgaagcatcttcattcaaacaaagtatcccaggctattccttcaaaatatttatgttccataatttcctttgaaccgccagatcctaatcttttagttggatccttaattaatagtttttcaatcaaatctttggcatttggggaacataattcatcaaaaacttcttgacttacttcaggccattgaatttcaccatataaaatattattaaaaactttttcaggtgtttcatcattaaatggaggatacccaaacaaaaattcaaaaaatatacaaccaatggaccaccaatcacttgatttatcttgacccttacctgaaacagtttctggtgctaaataatctggtgtaccaacaaacattcttgttggtttagattccgatggatcaaaaagtgcgtatgttttaggaacttcaatagactgagttgaggaatctgggtcaattttagttaagaaattttgagatttactattttgactggtagaatgtgaatttttgttatttattggcgaaagcagtgaaacatttgagctgggattcagactattttgtagttcagatgatattgaattgatagacagtctacttgcagatgagagagtacgtgctctagttttatattcttgttgtacattttgtggcaagcctaacatagaaaatggagctggttcattttttaattctgaaggtgaagatgtaaagtaacttttggaatttccatctttaattggagtttctggggagttcaaagaaaatggttcaactggtagtaacttggaagtaatagcatttgcaggtggaacatttttaaatggctcatcattattgttagtcgtagaaaatgagccagcacgaaatggttgcccactaaaacttccagcctgggaagaagttggagtccctccgattgatcccattcctggtgctcccaaacctgagatacttttgttacttgataaacttccatgggtactggccaaaccatttccttgtgataatgaacgagaatgtaattttgaatctgtatatttttcaattgttctttgacgattgaccaaacccattctacttaaaccaaaatcagttagcttcacatggccccaatgatcaatcaataaattatccggttttaaatctctatgaacaatacctttagaatgtaaatcatcaacatcaacaataacttcagcaatatattgtcttgcccaaacatcaggaagcgtacccatattatgtaaaagagttgccagatcacctccatttaaatattccataactaaatataaataatgagtactttggaaagatgcaatcaattgcacaacatgatcagaatcacactgggccatcataattgctctctctgccttaacattggtaacttgattcttagcaatcatatctgactttttcaagacttttatagcaacataatcacctgttaattttctcttagctagaaaaacggaaccaaaggcacctttactaattggtttaataatttcataatcttttatagatggtgcttggtgttttggagttgttgaaacaagtaatggtgataatggtggtttgtcaccagtggaactttgttgtaacattaaagatcctaatgacattttcgtaggttcaacgggttgtaaatatggtgagttaaatggagagctaaatgtggagtctccctttttaggatttttttgtagtgatgataatggtaaagagtaacttggtgatgtaggtctctgtggtgtgagtaaactgttaccagttatatttccttttaatctaggggcatcgtcacttgcaacagtaattattggtgtagatcttctgattaggccaggtgttgaagttcttggtgttgaatttcctgaacttaaattgtaactactactcgtcattcttaaatcttcctttgaacctgtaaatgaggattccaaataagcattattgaagactacaccttgatttgatgatttgggtgttttagggtatccaatttgaagggaagtaaaagatttatttttgttgatagaagcaatatctgtttctgactctgattctgaaaaacagaagacatgttctctaattttttgaacagcatttttaacagttagcaatactaattcattggtttccctggtaattctgtcaacatattgtaatatatgtgagtatctttcaatagtttcaagtttattatctaccaaaagttttgtatcttcagttaattgttggattgctggatcacttgaggcaggtaagttcagttcatgtaaattttttagagcaattcttgaatttggagaatacgctatttctacgaattcagctgaatctttatatgttgatctaatctcacctggattaattaaaagtgcttcatcacaataagatagaagaatttctaagtttctgaaggggaacctaatttgaggtaacaaagtacctgaactttttcttctttgaattagtgattgagttgtgtttaaattatgtggtcctaatggtattggaaaacctttgtattcattaattgatacaaaactactgttagatgatgaggaagatgatgataaagatgtctctgaagatgagttttgtaaaccaaaactttgaggtgaatttaaaggtgataaaactgatgaagaagtagatgttgaagatgttgaagcttgtgattgtaattgtggtaattttttttgtaaagattccaatatattctgcaatagtttcctatgttcctgtaattcttcttgattaatataaaccaaatcttccactcgatgttcaactaaacataattctgaatgtttctctaaccaccaatttggaactttctcttcacaaattctacacaattccattgatggaggtggtaaatcattttcatctgttgtttctagttctgttaaatatgtaatataagattccattaaatttattccaaaagtacctagggtagatataagttcatcaggaaatttaagatcgacattttgaattggtacccaaggcttaactatccacatagaatgacttggtttattaaatttatcgtggattaaaattccctgtgcttctaattccaaaaatcctccatctgttgttattgtagatgatgttgaatgaatgcttaaagaatcattatcagaattatcatttgaagttttggatattatattagaaggtacttcattgaaatttgtttgaacataatcatcttcattagttttttcagaacttacacttgataaagttggtgagtctttttgtatactggattttgaattgttatctgtagtttttaaattagtttgaacaataaatctgattttataactttcatcatccagtgtcatgatacttgttgctttatgaaaaacatctttatctgattcattaccaacaattatatttctaattggattatttataattttagcaattttcgttccaacaattacttcccaacttctacttataaacttaatattacaatccagatcaagctcaagtactaaagctttactttgagcaataaaaggattttcactatttttatcaattggagctctctttttagttttcaggtcgttggtagaagttgtaatgatactattatctttcatggtacttaaagtggaaatatcgttgttaatagatggagacattcgcagttgtttctctattgatgtgattgattgatgatcatctgtatttaggggtgatattgatcttgatgatacatttgaagtttcattaaattttacagggaatggagatttattattaagagactctatactatcaaagctatttaatgatgataaatttttatttttgccttttctatcaagattaaacaataaagcattgtgaagaattttagcatttgatgaattcaattcatgggtattattaatatctttagatttagtagatttattctttttatcagaacttttcaatgtattgtgtataaaatttttagttagtgagccagcactattaaacagattagttgttaatggacgattccttgtaggttttggagctggtagatgagcattgtttgtagatttgtgatcatcatttgtaaaattgcttatatttttatttaaatcttgtcttgaagtatttgttggtgaaggtgaagaatctctatcagcagaactaaacaattgataacgaattgtttcattcaatttatggtttgaatcctgtttactcattttctagtagattttaaatcctatatattaatcgtataaaactgaatgaacactttaaaatagagtaaaaaaactcttaaaataatacttttttaagtatttaaaattcttatagctttatctaccagaaaagaagatgagctttggtataaaggtaatgaaagtagtttaaacctagtattataatacaattattatgcttaaatcagttattagttgtatacccaaaaggggataccattgagtgatgccctctgaaattccacattcaaattagcatttataaaatatgcggtcggtacgtcgatatcaaaaccatatattacgtaacatgataataaacccgggcttatcgtgtcaagaaagagataatattaaaattattattttccttatctctccaatgtcaaattggcctgccacatttttatttgccctcaagacatttttaattgctcatcctatctcttttgttttatctatttacttctctttcttctttcctttcttcttacctttctcttattcctttcttttatcacctgctgtatttcacctgtgtattacatcaaacaaaacatctttaatataagttctctctctcattattttaactttatattttaaaaacttttaaaaaaaatctctcttcttatcattaaagatgaaattatcttcctcaatctgtttctcaatcgtttcagctttagctgtctctcatgtttccgctttagttttaccaaatttcaaagattctaattcaattgttgaaaaacaacaatcaattgaaaatgttccaacttctgaaactactacttcatctgttgacttctcagcaattcaattagttgatgaatctgatgctttagaaattcaattcaatgaaaatttaatcccaaattcttatattattcttttaaaggatgatatttctgatgatgcttttgaattccatagattatgggtttctgatgttcaagttcaatcatttgcaaaattggatgcaattcaactcgatgaatttgaaacttcagttaaaagtcttgatttccaatctaaaatgggtggtatcaatcatgtttttgactctccaggttttagaggttattcaggtttattcactcctgaagttattagtttgttaagacgttcaaaagatgttgcagttattgaacttgactcaactgttcatgcaattgaatcaacaactcaaaaaagtgctccttggggtttatcaagaatctctcatagagatactttaggtttaggtacttataacaaatactttatatgatgatgatgccggtgaaggtgttactgcttacgttattgatactggtgttaacattgagcatgaagaatttgaaggtagagctgtttggggtgcaactattccatctggtgatgctgatgttgatggtaatggtcatggtactcattgtgctggtactattggatcaaaaaaatatggtgtctctaaaaaggcaaaaattgttgcagttaaagttttaagatcaaatggttctggtactatgtcagatgttgttaaaggtgttgaatttgctgcaaaggcacacgttaaagaagcaaaagaatcagaatccggttttaaaggttcaaccgctaatatgtcattaggtggtggtaaatctcctgcattagatttagctgtcaatgcggctgttaaggctggtttacattttgccgttgctgctggtaatgataatgctgatgcatgtaattattctcctgctgctgcagaaagtgctattactgttggtgcttcaactgtctctgatgctagagcttacttctctaattatggtaaatgtgttgatatttttgctcctggtttaaatatcttatcaacttatattggttctgattctgcaactgccgttttgtctggtacttcaatggcatctcctcacgtttgtggtttattaacttatttcttatcattagcaccatcttctgattctaaattctcaagtgcaagtattactccaaaacaattaaaggataatattattaaatatggtactaaagatactttaacttctattccagaagatactccaaatgttttaatttataatggtgctggtggtaatattagtgatttctggaattacgaagaatcatcaagtgctgaagatttaattgataattcaattgaaaaattaaacaaatacactgaatcaaacatcaatgatgccaaaaatgaaattaaacatttaattgatgaaattgttgatgcagttgagcatgtcgtttcagctgaattaatttaaatagaattaatttgcatttgtttttttaataagtgtttggtttattggtacttggcgtttcttattgggttaatttttttatttttatctattattgttctttcttttatttttactttcatttttcattttcactaaacaaattatatttttatggcattctattattattttgcacaatctataacattttataaggagaaaaatcatctaaggtttattgttaaaaagaaaattagtttcgcagtaaaaggaaataagccaaaaacggttagttaaacagaaaatatacaaaatacaaagtggatatataaagttgaataagaaaacttatattaatttgaaaaatttcagtatgttgtagcaagctgagtaaatagaataagcacttgaaacaaacttaaagatcaaccgtccaataataaacaataaaagtgaattaatcagacaaactactaaagcccttacactccattttcttcttgactgttgaggaataaatttacctagtaagtaaatgaagaatgatataaacccaactgctggtatattataaagaaatctttgggttgaattattaaattctcttgcagtttgatttgatggtacatattcttctaaccaaagataaaattcttgtaataatgaaggtgaagtatcataaagatttgaaaaaaaatctggttcttgagtgtaaataatttctttataagttgatttacttcttcttgattttttcttagttgtttttggttgaattaaattttctatgtatgaattattatattttaattgattctgttgtgattgataattattttgatcactgttcaatgatggattatgtaaaccgttaactttataatattcatattcttttaaattttgaacaaacttttcacgttcatttttaagtatttgataatctctttgatttctatatctttcagctttcagtttagctttctcatattcaatttcgattcttgatttatgatcaaatgaagcatctttgagcgatgttgttacttgttctgaaacaactaatgatttagtatgctttgattttttctttgatgacgatgatgatgatgataatgatttcagaggatttcttgactttttttcctttgaaattatttctgtttcattttcttgacgaatagaataaggttcaataaattcatcagagtctgatgttgaatcatcaattattgtagttgaattagttgaatttgaattaaataaatctggtatattaccattcctgctggaattattacttttattattgtatctaacagattcaactaattcaggctcagctctaagaccaccttcttcattttctgataataccaaaaaattaccattagattttttaccattaccatttttcagtttcctaataacattctttggtttaaaaatattcagaccacttctacttggtggtgattgttcgaaaactccatgttcagcatcaattacatgtaatgatccccttctcctttccggagtttgaaaaacgtaatattgttcattagaagttgattcacctgtactacttctactgatacttgatcttctgctacttgttaatatcgacatcgtgtagtttgatgattaagaagaatatatacagtctaaaatcgataataaaataatctactctataatcaaattcaataagacttccccttacagaatattaaaattaaaatttattacctgtcacaataaaaagatttactatgataatcgccagacttgcccttttgggacagccgttttctgacccagccacccttaatagggaagcttgatctactctatttataatctatttactccagaaggtacggtgatcagcaagtattgcttcctctaattcagtatcactctctgttgtagcaaatggtccaacaacttgaacatccttttgacctgaattgaaaatttctctacatggcatactaagtgtcatattctctgtattatcacccgttaattcaagtaatttttcttcacttaatccataaacaactctaccaatatttgaccaataaattgaaccagcacacattgagcaaggttcaaaatttgtatataatgtacatttccataaaaaatcttgtggatatttatcaaatgcaactctacaaagagttgactctgcatggtttaatgtattaatattaccttgttcaattaaaactgtttcattatctggtccaactaagattgatccaaatggatgatgaccttctttcataacttcatgagcaacactgacagacttgaataagttatctctaatctgttttttattaggatttacacgttcagggaatatgtttacactcattgttcaactggattgaaagtgatatatataaccgttggaaaaagaatttatccttacaagtcgcaaaattattacatttttcactttttcattggttttatattttagtattatagaattttgtttaaaataaagtaaaataaaataaataaaataaccaattcaactcaattcggctcataacatataaagttaaaaataagataatgtcgttaaaataaaataaagaaattagattcacatcagatcagtctgatataaacatagattgtccagcaatttcaagcattttatttcttacctgaaagactgtcactgatcttttggaaaacacctttatcttcttcaggttgtaaattggatgctgctttatcataagtgttagatgcaccttcagatgccttatcccaagtggatttgtgtgaatctggagtcattgtttctgaaattttgtcagagaagttctttctaccttgatcagccattttgtttatttaattaatttgtttttcggattgttcctgataaaagaatcctaaagtcaggatttccagtattgaggaataggggaacaactagtatttataacaaactcgaggggacatgtttgtatacactacatcacctttcacctctatgggcatggttatagggtcttttttttgatctcctgtagtttattattacaggggatggttatatattagatcagcaaagctggactcatgagctactgaccaggtaaataattactataaaggagatataacaatgttatgggaaaggaatccatctagacatgtttttttgatctagactttttctgtacatgatgacgttttattgacattttcttaatcattgcacaaattgtatttattaattaattaaacaaagagaagtgacataaactatttacagattttctggtattatagcacagaaaaatattgtatacccttaaaataattaaactgattaatactgaatacatgtatgtgattaaattgagtgatgatcttatttactaattagtcttttcttgtaattcaatttgaccattaccgcaacaaccacctgtggtattaccagcctttaaagtagatttgtttactttaatgtcttcattatcacctaattcagtgtctttatgaatattcaaaacatatcgactatcatcagtatcctttttaacagcttgaacaatattatgtttcaaaaattctgaaactttttcaagtaattcaaccctttcttcaatattgagtttcggattagaaattgatttttcagatttaatttcttgtcttattttatttctagcttcatttaatgttgtaaagtcattattaaatgcaatttttgttgcacgtaatgatgaacgatatgcattcaatattctttgtgttgaagacattttctgtatgttatttatctagtgaagtggtgtattattatacccaaaaaaaatattcaaaacctcttagtcaataattttcactcatttaattgatgtcttagtaatgaaaaattaaatttaatctcatttgttatagtaaataagcaaagaaaaaattaaaaaataattgtccctccggccgggatcgaaccagcgacctcaagatgtcttgtatgctgtttaagcctattacagtctcgcgctcttccaactgagctacagagggttgttatgtttgttcaaaggtgttgtcatttgtcaggaatgatataaatatagaatataattacgtaagatatattacgtaagtaaatgatatattgatagtaataatatcataatataggtaacggggcaactcgttacatgagatatgtataagagggcaaattcccacaggatataatatgtgggaataactaatagttatgtagttcttcttatatagattcttatatagatatagagaaatcgtcctttaagtagaccttattattagatattattacgtaagtcatacctagagagttaacaagtctaacaggttaaaagcagttctaaatatgacaagtaataattcagaggagaaggtattcaaagatttattggaatcctggaaaggaaaaatattcgattctatcaaggagttaactgatgataaaaatccaaataaatctgaaacagtagaatcatggtacaaacgagtcgagaaatttattcttgataatacaccatatgattcaacaggaggaattattattggtaaaattctaaaaaacaaggatatacaaaacttatacagtaaaggttataaaattgaaaaaattaaaattgttgatgatttcgataaagaaattacaaaaaaaaatgtcaaatttaatatgatcaagttagctgaatataagttaagtgaagtgttatcaaaatttcaaattcatgataggtatgaatcagtagttaacacgttggacggaggaaaaaatagtgagattgttaaaagagttactgatttatgggatagcgatatggaaatggaatactcacatgttggagtacttcataaattatacgttatcaaacatgcaaaatctaatgaattatttgattccgatagtcaattatttgatataattgattctttgagatttaaaaatattaaaaaaagaaagttagaaggagaagtttggttatttaaagacgttcaagattgggtgactaatagatggaacaaatatattaatgctaccagaaaagagcaattgatccaaacagcagcatctatatatgaagaaattatgcctttttttcatgagaaccaaatagcaaatattaaaaaaatagttacaaaagaattgaatgaagcattaaaaaatgatactgaaataagcatgataaaagttatgggagaaatagcaaaacttcaaatgaaagatgatttaatgaagaaaattatagatgtcgaagaaaatgaaaatttttatgatggcaaatcagaagattttaagaaaagaagattcattgaaaaaagtaataaggaaaaacaagtaacagaaaatacatcatcttataaaaaagcagtcgaaaattataaaaaagcaatcgaaaattatgaatggttaccaagagatggtacagatttatacccaaaattaccacaaggtgcattcatttgtacaaagaatttagattattgtccaaaatgtggtggtgaacatcctgataatagtcatatgtttgacaaagaaagagttatttggcagaatatgaaacctttttttggcaggatgaaagctttagattcattaagagagaaagaattaaataaatcaaagaattggaatatcaaaggtactgctagcaattctaaatcattaaatcataaatagcaattaagagatatagctttatataacttagaaaataatattgcaattaataataaagctatatcgaaaaatgaaaatgttttagaatacattttagatactggtagtaatatatcaacaacaaaattagctaagaatgaaaaaaataaaagatcaatcaatgaaataaaattagcagatggaacaaaacaaaaattgctaactacaagaggaaacttgttaatcgaaaatgaacaaatagactgtttggaattaaaaggagatgcaccaaatatattaagtgtatcacagcttacgaatattggatacacagcaattattacaaaaggaaagtttttgttgttaaaacctagaatagaatattcaggtgaagtgaaaaaatggcttaaaaaattatcaaaagattggaaagattatattattgaaatagaagaaaaaaatggattgtacaaattaaagatggaaaaacaaataaacaaaaatcaacaaaaaatggtgtttataggaaatactacacaaaaaaaagctgtgaacttaatgatggttgatacaaaacttttgaaattggaaatgaaaacggctccagctagtccaattttaagactacattgtgcttttggacatatcagcttaaaaaatttaaaagaattaaaaatccctataaaaaaggaagatcagtttcaagtaaaaaattgtcttacgtgtattgcaacaaaacataaaatgaaacctacaacaggaagaaaagagagaaacattgatgaagtttttcaacaaattcatgtggatactgctggaccatttatcagaggaaaacacaaatggtatgtggtaattgttgtggatcaatatagcaaattcatgtattcagcaacaacatcaaataaacatgatatcaaagatatattaaataagtggcttcaagaacaacatacaacatataaaagacaaccagaaagaataacaacagataaaggctcagaattttataaattagcttatacaacaaacatatatggaaacaaatcaatggaagtactaattgaaccacatctggatttggctcctactggtaataaacaatggaatggcactgctgaaagagcggtacaaactttaaaaactttacaaaaattgattacggcacatttaaacccagaatcggagaaacgttttattagagaatccttccaatatgcaacaatgatatataatcatttgccacattctagtattaaatatgaccaaccagcaggcagatattttgaaagaaaaaataatgaaccatataaaagagagcaatatctagaatcacaaccagcaagattgtttttcggaacaggatatgcattacctgaattgccgctattcttagaagatgttgtgttttacacgactcctgatgataattcaaaagcagaagaagggtattttataggatatgatatggattataaattgaagataaataacaaaaaacataaaacacagttaatcactagctatagagtattaaaaagttttgagttacatagaaataaatcaattagacaagcaaatgaggaattgatatttgttccacaattattctatcaaaaaattacagcaataaagaaagatattaaaataccatcaaatgtctatgcagcaaaaaatgatccattatggaaaccatctgtggaaaaagaaatggcaggtttcataaaattgaatgtgtttagtaaaattaatgaaagaaaaaagcttcctaagcatagtttaaaaatgcataccttttggttattctcgttaaaacctccattaatgacaccaaaatccagattgataacaattcatagagattgggttggaaagaaaaataaagaggcaagtagtccggtggcaagacaagagtcatgttttttaatgtttagtcaatatgcaattgataaaacaacagatattacaacatatgatatatcaacagcttttttacacgcagaaattgatccaaaacattattattttttagatagaccacaaggatttgaagattattttacaacaaagttagttaaattagaaaaacatgcatatgggttaaatacatcaccaaaggcattccatgacaaattagtaagcgtactacactcaatagtaaaagatgttataaccgatgaatgtctacataggtcgattgattataaaacatttattgtggaacatgttgatgatataatgttactatcacattgtgcaaaaaaattagaaaaattattattagacaactttgcattaaaaataacaagagaccctgaatattatttaggttatgatattgcaaaggttaataatatgttaattttaagtatgcacacatatattgaaaaagcaattaatgatttaccagaagaaatgataacatttataaagcttccaactagaaaaacaggaaacattgatcttattgatggtgagataccacaagcagaaaaaaatattttgaaaaatctttatgaaataggtaatagaagagatgatgaaaatgtgaatatggaaatggaatatccaaagttagatatagatgatatcgatattgaatcacttatatcacctaatgaaaaaagtgttaaattaaaactagaattaatgaaaaaacttaaagaaatcaaagggattaaaaacgataaagaaaaatataaaaaacttgaacaactagtattagaaaaacataattcgacaaattatgaatcattttacgaacaacatccacacttcccgcatgaattatttagtttaagaatgtatcaaaaattagtgggtattttaatatatatatcacaaaagggtaggtttgatattcaagttcatgcaaatatgttagctcaatatagtagttttcctacaatcatgcaattttatcaagcactacaagttttaaaatatgtgtatacaacaagaacatcatcttatagatatattagggaggataaagaactaataagaaatacagatggtagaattgatgatccaataaaacttgacgtgtatacagatgcatctcacttacctcatacaagccaagggggatattacatagtattaaaccagagatatattaaatcaaaaagttataggatagtacaacatgcagactgcagttttcaagcagaaattttagcagttagagaggctgttgaagctgcatgtgatattaaaaccacattagatgattttgggtataataatataatagttactatatattgtgacaatttgccagtagtcgaaacaattaaagaacaacatagaagacctgatttcaaggaaaaattattactaaatacataccacaagttaagaaattattataaaatgggtttatttgatatagaacatataccaggtgcaatcaatccagcagatatgctaaccaaaacggttggattcactaaacttcatgaattattagaacatccatccataaacaacacattttgcttagaatatactgagtctgaatagaaataatccaatatgtgattaaacaatataaataatccaatatgtgattaaccaatataaataatccaatatgtgattaatcaatcataaaataattaatccaatatgtgattaaaatgctgattgaatgaattataaacaaatataagtataaaaatatttaatccaatatgagattaatcaaattataaaatatcttattgctaaaatataaatataaattgaaagaaattcaaatgctaagcaaattgaaatttactgacatttttccaaccccccgagatgtcaggaatgatataaatatagaatataattacgtaagatatattacgtaagtaaatgatatattgatagtaataatatcataatataggtaacggggcaactcgttacatgagatatgtataagagggcaaattcccacaggatataatatgtgggaataactaatagttatgtagttcttcttatatagattcttatatagatatagagaaatcgtcctttaagtagaccttattattagatattattacgtaagtcatacctagagagttaacaagtctaacatcattctcgtaattgattagcttgaaaaaaaatttttagaaaagcactaaaactgctctaattaaccagctgatactgaacaaaagtgcattgaggtgtattatatttgtatggcatttgtaaactttagagtagctatggcttttaacgaaaaaatgatttcattaaagttcccataaatcgtgaaaaatataagtctcatcaatctctatggtagtttttcaacactacttagctaaagtgccaaataatagatagcaaaaaaaaattaagcctttaaaaatgctttttagattacacataaactataaatacaattttaatctatttatttgaagcattaagaagtttatttaaagttccaacactataccaagaatttgaaatatttgcaatccccatttcacccttgacataattactatctttaaaaccccaacctttcttatttgcaaattcaattaaaatatcattaacaataacagcaagtttaacaaaattttcttctttaaatctttctaatctataatttaacatccaacaaacatctctagttaaaccatttttttcatattctgatttaatttcaggaaatttatttataattggtaacatactttgtctaaatatatcaatattaaccattgttaaataaaatgcttcaaattcaatttggttaggtttaaattcacgtaaattagttttcttaaaattacttttacgatgttctaaaaaaacttcaataatcttctctgaacattcaaaacaatttgggaaattttcttgctttttattacccataaaattatataataatgttgaaagcatataacttagacggaaaatttctgtttcttcaggagattcccaacaaatttctaataattgcggtaaacctttctttaaatgtggagtaaactctgtaccgtctaaactcattgtatgtataattgagtgaaagcaaatacttgttcattcatcatcaataaaaagttgttgaaaatttcactttcttttaatttaatttaatttccctaaagggttaaattggataatgttaacgcgaagtagtgatgtaatagttgtaactattattagaggtttcatgacaatattatgggggatattaataaataaataagtataaaagtaggtaactaactaaataactatagagtataataactatatttagttaaatttaataatttgtttaccagattttgaatttttcaaagcattaatataagcttcaagtaattgatcatcagtaagagaatcaagattaagttcagtttcattatatttttgttcagttaaaacacctgattcaattaatttagtaacttcattaattgtatcaattcttgaatttggaattgatttaatattaccagtaatccagaaacctttaatatttaaatttttaaaaatcaataaacctgttggaactgtaacaggtttcattgacataccaccataagttaataaagtaccactattacctaattttctaattaaacccgttgcacttggaccaccaacacaatttaaacctaatttaatttctttaccatttaaccaagatttaatttctttactaaattcttttgattcattttcttcatcagtaataactttagttgcaccaatggaatataaatctttctttaattcatcaatattatcacgatttctaacaacattaattgaattaatacctcttgattttgcaatttggattgcagctctaccaacttgagaatttgcaccattttgaacaaaccaatcaccaggatttaatttttcataataagttaacatttgataagcagatgaaggattaactgcaattgttgcagcttgattaattgataaattttcattaattttaattaaatcattttcatttgataatttatgagtacaccaagtaccataattaacatttaaaggtatacaccaatcattaattttcaaatttttaacatttgaaccaattgcaataactttaaataaaccttcattacctgaaactgatgaaggttttaataaatttggtaatgaatcaattgaaattgaaggtcttgaagggtaaataccttgaatttgattaatatcagaaggattaattggagttgccaatgattgaactacaacttgattttcatttaattcatttaaattaatattatatgaatgacattttatttcatcaattggttcaccataggatgaataaatgattgctctagcagtaattgaggaattagttgacatcatacgaattgatgcaggtgattgtttaattgcccttgtaaagattgatgtgaacattacagtaataaagtatataacgatttgccactgattctacagaaagaacaagtgattaaattaaatagagattatttcaactgtggggtaattattaaagctatttattatacttatattcaattagtaatcacctctatataaaggctatatctatattaaggagagggtttctctttagttattactgtatagactatatacctgtcaatatattactgtaaactactatattactctagtacatacattatatatattactgtaataacatgcataacccatggtttgcataatgtaaaacaaaagaaaagaaattttttccatctcttaaattgacatggtaatattactatatcttataatgttcttatcttttgtaggtgtagatatagatatagatagctacttatcatccattatagtaactgtgaaatggtattgaaaccatcacataatattaacaataaaccattacattggtcaaaatctcatgctgcatcttcattaagtgtatcagtttcaactccgacatcttcatttaatgaatgtgaaactcaaatatctggtttcccaccaattcaaattgaatcatcagaatcttcatcagaatcttcagaatcttggcctgaatatcctactcaacctgtattgaaagatcattcaaaattgtcatttttagataagtatattttaaataataaaattattcatcatcccaatgataacaataataatcatcataataatattgaagttattaaagaaccacctttatcatcatcatcatcatcatcatctagtgtaccatctggtggtgcaagtattttcaaaaaaatgatatcacgtaaaactttaataccgaaaacaaaagcttttaaaagaattactgcagatatgcaatttgaacaatgtccattagatgaagaaattcatcatgaattattaacaacaattgcaatgagagaggatgatcttatattaaattataatcctcataatattcataatacacaaaatttaaataatattcaacatatgcaaagtattcaaaataaacacaattttgaattaattcataaagctaatgaatcatggaataaaaatcgtagaaaatcaactaattctattaattctcaatcaacaaccaatggattaaatgatactattatatttaataaaaaacctcaattacaattatcgaaaacaaaatcttcaattagtataccttcattaaataggaaaaggaaaaggttagtagatgatttacaaacttataatgataatagtaataataataataataatttaactgatcaaggatctgaacatggttcatgtgttgaaactgatcctgaaacagatactgaaacaagtcatttatcttggatgataagtaataaacgacgacttgtaagtgcaagtgttacaaattcacccaaatcacctgcaatggaaccattcccgagcagaagaaattcagtattattcctaagtctacaaagtgcatctgatgaactggagaacatgtctcttaaataagaacagtatgcattatatagaagatcaaaattatattttaacttttccaccctccctctttttatgtaaaccttattgtggcggctctttcttttctaatcaataaaatccattcctttcaaaaggtataatatattataccaaatacattcattcaactaacagtatatatacagtataaacattcatttaaatacccataactaaaaaataatatatgctgaaaagttttaaaattgtaatattatgaaaaactcaatttcaaatgaaactttaaaaaatgtttcaataaattcaaattctaacgaaaattctaatgaaaactcaatggttaatgaaaattcaaattcttcaagtactaatacaactaaaataatctcttcaaatgaagaaaatgatacattaatacttaataaatcaaaattaaataaaatacgtatagaaccaactagatttccttcattaacttttatttcacaaaatacttcattaaatgatagagagacaagtattaaaaatgcaaatttgaaaagtgaattaattgaaaataataaacaaaccaaaaattcaaaggaatcattatttaatactcaacaaattataaattatgataaagatcattcatcacaaattaatttaaatgattcaattgaaagtccttcaatatcagtaaataattcaaattttaataattattcaaatatcaataataatcaatctcatgttatatcgaagacaagtagtataaatactttgcaaacggtatatactgatgcttgtagctacatagaaaatgatgataataaatcaactactcaacgttttaatgataatatatcaaatttatatccaactgattttgatgaagcaaattcaatttatcaacaatcattacattcaactaatcatgatatactacaaaagaataataatttaacaaataatcttaatcttaatcttaataatatcaacaacaatactaatagtaatatgaaaaatggtactataaaggaagaaactgaatcatttatttacaacgatataaattctgttgatattctgaattttaatgatcataaactacaaaagaaaggttcaaatgttatggtattccaaaacccatttggaaaagatctcaatgcaacaaacaccaataataatatcaatcatcatcgtagtaatagtacctgtattacaattaatacaaatactaatgacaataatcccaatactaataatgaatttgattttctggataatcaatcgttatcaactattcaaacatcaaatgattattatttgataaataactcaagtaaatctccaacttctaaaagatttatatcacaacaacaaaatataccattatctccaacatattcaaaagtacgacaagtttctcagaaaatcttcccaaattttaatgcattttcagttaataattattctaagattaatcttgataaaagaaataattttagattaatcccaaatgattttaatgaacaacaaaataatttgttaccaagtgattttgataataataatgataatgaaattttagaagaaattcatgaagaagaaaatattacatttcctaatataaattcaatcaataataaaagcaagctattaagaaaatacaataattctaatttaaaaacttataataatcaaaagagaaataatgaaataaattacaaaaaaaataattcacaatctaatcaacaatttattgattatgggagtacacatgataattattcaagatattatgattcggttgatgattatattgaacgtgaagatagtatatacaataagagaaattcaccacatgattataaatcaatgtattatagacaaagtatgatattgaatttcttaattagtggaatttatattttcattgcattattattactattttcatttatcaaaattttcataatgaagacttttgataattcattaaataattttgaatttttaaatttagaaaatgttttaataagtgatgaaattttattaattgacataaattcaagagcagttaatattaattttcaagatattaatatttggaatatggattttaatattttccttataactgatgaatcaaatttaatggaaataagtgatgataataaaatttattattcaaattctaagaatgatattacaattttgttaggtaatattaatagatttttaacaccattaagatttaatggtattgttgattcatcaaattggaaagaaatttgggaaaagtggtgggattccaaaaatatcaattcacaaatttcaaaagctcaattgaaaatgtataatcctggtaaagatttttcatttaatgattcaaaattaactcatgaacaatggttaaaaattttaaattcagattataaaatcattttaagaggtaatttagaatattcgttaccacttgtttggcaaaagcaatttattagtatatcagctgaaattgatattaaacctgaaacaaataattgatcaactggatttgctttgtctataagttattaatttttgtaaatcacctctaattttcctattttcaatattttctacacctctattaattctaagtaataattttttatcaattgcaggacatttaacatcattaaattcatcaattttagataaccaacaaatatcacatcttctaccaattggtgtacaaacagtttgaccaaatcccacaagtacaggattaatttccatccataaatctttatgattaatcaacattatttctaataatttcctaacattatcaggatttttctcattttttggtaaccaattaaacatattacacaatctaaccatatgagtatcaacactaattccaacagtttcattccaagcaccttgtaagattaaatgtcccattttataaccaattccctttaaattaattaaatcatttatattatttggtatatcatcgttaaaattttcatgtaaaattttagaagtttcaattaaataatttgctttccttgaatggaaaccaattttgaaaatcatttggtctaattcattataagaagtatttaaaattgattcaatacttaacccatttttataacctttaattaaataatttaaatgtaaattttgcattacttgataattaatttcatcctttgtctgtgaagagaataataatgttacaagtaattgaaatctccaaaatttatcaatattcgatttattattttcaattaattttaattcttcaaaatagttgggtatttgatcaattgatatttcatcacttataccattttgaaatcttttcgtaattaagaataataatgcaggtattttaacacaaccaatcaaatcaactggagttgtaattaattttctcatttctttgattttattatacataggaaagaaattatcaggtattatagagtcattatcgccatcatcagtagtttccaatttgatatgttgaagtttccttactcttttagttcttgattgtgtttttgattgatccaaaacttctgtgttttcagattttacttttgttatagatgttgtgcttaaattatttgataattttattttatttttaaaatatttactttgtgacattaatattagaaaaatgggaatattatttaatttagtatatgaacttatagatttactatacgttgttaggaagagatagaaagataatatacaataaagaagagatatatatgaaatttgtagaaaaaaagaaaaccgatgtgccgagataacttaatgagtgcataatgttgagtctatataatatgggattggtattggtattggtattattagttagatgtttaattatttgatgaattcaaattgtgataaaattggtaaatgatcacttgggaattctgaatttgggaaacctttgaaatcttttaaataattttcatcaatatcagctaaaacttttgtaaatttaaaatttttattatcatcagcaaaccaaatataatctataacatctttatattttggtgtataagttgtctttgtaaagattttttcattatataaatctttataaggtgatttaaatgtacctaaattatttttcaatataccatttatatttgaaccataatcttgattaaaacttggttctaaatttttatttatagatccatttgataaaaatttataaaccattgaatttggatttgaattaaaatctccagtcattataatatttggaccatttttatttttaattctttcatttaattcagtttccgttatattataatatcttaaaactgtatttttaattaaatttgttaataaataagattgcattaatttaacatcatcatgttttggagaccaataaagatgagtatttgaaatgaaaataacttcattagttaatttatgttttaaaactgcaattaaagcaacagtatttctaatatttaatcttgtttcagtatctaaagtttgttcaattattgaagaatgtttaaaattatttgcaaaattaacttgttcaaaattaattaaatcaaatttttctttattataggctattgaaacaccatccatcatatttgaagattttttccaataagcaggttttggctttttattgaaaattgatgaataaccaattttattaaataaatttttccaatgattttgataaacttgatattccatttcttggaaacacattatatcagatattttagataaatcaataaaatttttatctaacctatttaaacgattattccaatttgtaaaattttgaggtaaataattatataaactttcccataaataatgacgagataagatattatatgaagatactgtaacagtatttagaggatttttaacataatcaagagaaattaattgacgatgatttaaaattgaattattattagcattattatgatcattataattataactattattattattattaatattattaatattattattatcaatttgaacaattttagcaactttagatacatttgaaagttttggaatattaattaaagaattggaaacattattattaatattaggtaaagtaagagaacgtacgaaattatttgaaagattagtataactatgggtcataccggagatattaattggaactggcatgtctcgtatagaatgaagatatagggaagaatagggtgataataaatgtaaattaaagaaaagaaaaagtagtgataaaatgaacatcctaaacacctctactataatacacagacatacctaatacatacaattgaaactacattgataatatacaaaactgcaatatccttatatatcataaaccttaactccttaatattaatattattattataagatcttcaataatgccttttaaagagggggtgtattttacttcttttttttccttttttgtattttttttactttttttattgtgttaaatgcggggtgtattttcataccattacgtaatggttttcttacatctatttctatttctatttctatttctatttctattatacttggttaaaatactttaaactgaaattcaaattacataatatactatactatactatactacttatacactggtaatatcttcctctctatgtcttacgtgatccacttccactaatactattaatattactattattaaaattattattattattattattacctccgttattaccgctacttccgaaatctgcctttatacgtttaccattacctccctgttgacgacgaaattctaatctcgtaactaatgaaatatgatcagatggccaatcaatagttgggaatcctaataccttattggtataatctttatctggttcacctaaaactcccttaactgaaagtgaagaatttgaataccaaatataatcaataacttctgtaaatgttggtgtaaaattagtaaatggtaattctccaataatatcatatgcactacgtaaatgaaatggatgacttaaaccttcactggtaaatttaccataatctctatcctttaaatctccatgatctttagaaaatccttgtgaaattaattgataaacggctgaattagtttgtgaattgaaatccccacaaattaataatggtactttgttattttcattattattgttattgttattgttattactattaccactatttccaatactatatttcttggtaattgattgtaattcatctaataaaactgcaacttgcattgccttaacatcattatattcaggatcccaatgtaaatgcgtatttgcaataataacttttctaccacttggaatatgttgtaatatactaactaatgcaatattatccttattcataaatctattaaaaacatcatcagttttcttaaatttttcttgacttataacaattttaccatattctaaaattttcttatcaactaattcaaacattttactttgataaaatgttgcacatccatcaactcttttagctcccttttcattcattgtctttgcacgactcttacaatggaaaatacctttataacctttacttaacattaatggtacccaataatcttcatatgttctactttcaacttcttgtaaacaaattatattggtagaatatgataaaatttcttcagttagtttctcacgtctatattcccaatttaatgcccataatggtgtatatttatacattttaggtgttgcataatgttgacataatgtattataactcattaatgtaaatgaattattatccttactctgtaaatcaatctcattaatattctttaaatcttcatctttcatcattggttctccatcatctccaatactaatccatcttcttggttttggtttatctaatttaatacaatcatctctaaaatgaataattaaacctttggtaccctttttagatacaatattaacaatttctttatttaaattaatattaccttcaataccaataaattctaatgaaactaaattaccaaaatttgatggtaaatctttaatatcattatcaaacaaatataaatatctcaaattaaataacatacctaattcatcaggtaatgtaattaatttattatttgatatatctaaaactcttaaacttttcaatgtaccaatagatttaggtatttcagttaaattatttccatttaaatataatcttctcaaaaatgaatatctaaataatttattactaatcttattcatcatttgtccacttaaatctaatcctgtccataattgagtattattttctttaatacgaattctttgatcttcctcttcttcatcaactgcatctgcttcaagtgctcctgttttccttgcaataactgcattagataatgttggtgtacttacattaccattatttttggcactttctgcttgcattaatgcttgtgtattggcaatttcttgttgtttaataacatttgttaaaatgtttttagtaacttcaattaatgtaagtccttgatcatcaatcccaccaatttgtgattgtaaaatagattgagattgtgattgttcagaaaattcagattgatcagattgttgtgatggatcagatggttgggattgtaattgtgatgcaaattgtgactgagactgtgatgttggtaatgattgagattgagattgagattgtgaaagtgattgtgaagttggaggtggttgaatattagtattttgaggtaaaagatttgtccttgatgaacttgcagcatgtcttgcatagaaatgcgaaatattagatcttcttgaaacaaatgctaattgtgtttgatgtttccaatgaatagaatttgcaattgtttgatcaactgaaattgatttgtattcaacattaacattattgaatattgttagtcatgttattaccattaagtatcatattattgttattatcatataatgattgattcatatcagtaacaagttgagaaggttgtaattgtggagtcatttgattcattgaatattgattttgaaacttttgagctaataaatgttgagtcagttggtgagtcaatggttgatttgaattattattactattattgttatcagattcattgtttatagatattccggaagattgtgataaaagtgaacttacatcttgtttttgtttctgtaactgttgaagttgttgtaattgtaattgttggagctgttgttgcagatgatgcaattgttgagtagactgttgcggttgctgctgctgctgctgctgttgttgttgttgttgctgtaattgtaattgttgttgaagttgcgacaagttattgtttccaggtaagcctctgatattattagataaaagatttgatggattcataccttcatttggtgattgagattcagccaattgctctaaaacattatcagatggattgaattgacgttgttgttgttgttgctgttgttgttgttggaataaatattgagaattattatattgagcacccgtagattgaccaggaggggacaatccattgggtgttgacccatgtagttgatattgtgttgcaagattcattgattacttccataaatgataagattttcaatactaaaaattgcaacaaagttttttttcagtgtttttgtgcttagttagttattaaagatgaccttaaataaataaagaaagtttaatcaaaagaatacctattaaaactgtagtataaacctctaagagagcgtgataatgtagtaaatcaaccaattacagagaccaagtttgccgtcgagtgtaatcaataaattcacctatgaatttccagatgtaacttattacatgtttttctcgacacttgagattaggaagacgacagtctcagagggagaggcaaagtgtaaaactgcaaatttttaccatgagaaagtcgcgtctgccaaagcaacactagtacaccgtttattacataatcattctatacactatacactatatacacactaccagagtgtcttagacatgaacttcaatgtctgtctggcacgcttcaccaaatctacgggatagttgggtatcaataatataatcatcaagtgatgaagtgttttttgtatcgtaatcagcggatgttgaattagaagtggacacttcttctttaatttcattaatttcattattttcattatcattcaaattaacataacagtaactaaacttaccatctttaacaatcagatcttttaagtattttaagttagcatcattctcctcacttccatctactctattcataatatcttcaaaatctttacgttcaatccagttgacaatcagttcattgaatttaccttcttcaattttatattgatcattcaatgatctgctatctaagttataattcttatatgatccaatcaatggccaaaataaattccatatatttgctttctctgattttttcaccttcatttttttcaataatggatatttctcattgaagttttggatatttaaaacaattgagatttgtaaatcaagtaaatattcaccatcattcattttaaatacatacaatggtaggtaattttctatttcattcttttcaatatctttatcaaatttaagattttgtaatccatatggataataactacgtataagctttcttttctcaatttcttgatgcatgttctctttgagtttactcatctcttgttctttcaacaacatattttgttcttcttcctcctttctccttttctctaacatctttctttcaattttaagtttttcttcttgtcttgctttttctaatgcatcaatcttttgggcaatttcttgttgcttaagtcttttacgttcatttctttgatattcaagggcttctctagccttttgagcttcaatctctttcaacctcttcgcttcaatttcttcaggtgtaggatcaacaggagtattggccttctctatactttccacacttgcctgactttcttggtttgattgactccatttttggtatagtcttcggtgatggagatcttatatccattagtttttcttcagtaagttttttctttttatgaacaatttcttcttctccattatctaaagcagaattatctctcttcttaattgcaatatcataatttgttatattctttgatacagaaatatcaactagcaacttcgtctcctttgtcatcctcttcatgctttattccgacatcaacagcttcactaaaatcaacattatctgttgcatcattaattttagttgaggtattaacaaaatctaaatctgattctgcatctggttcagaacttgaatccctcttctgattcaggttcaattaactcagagtcttccttatcatcactatcattctttacttctttcttattctttttatcaagtttaataactgaagcaccaattttggaacttaaaagtttgtattcttcagtatcagtatcaccaatttcagttaatatatcaagtacatttctaccctttttatcaactattgaaagatcagcttgattggataataataatttaaccatctccaaatgatctttaccaacagcatgcattaatggagtccatccattcttatctttataattaatatctgcaccaaatgcaatcaataaacttgcaatatctgggaatcctaatcttgaggctaaaagtaatgattcagctggtattttattaccatttgtacttgaaacataatttaaaacaaatgtaacatcattacgtctaattctttcttgcaaagaatttgaatcattgcctttgtatttaccgagactgttgataacttcctcactaccagattcactatcattaatcctttttctatctttagctttagttgtaacggaatttctctttttgaaggttttaacatatttatttaataatttccctattttcttagaatctttcaaattttcatcatcttcatcatctaattcattgatcgcaagttctaaagcatctaatgcactattaccttctgcattcaataaagtcggatctgctccattttcaagtaaaagcttcacaacatcataatgaagattagaaactgcatcaattaatggtgtatccttatccatctgtccactttgaacattaatattagcaccattatcaatcaacaatcttgcaatttcataatatccttctaatgccgcttcatgtaatggacttatacctgcaaaatcaacacagtttatatcacttttggattcaattaatcttttaacttcatcaagattacccttagcacacattctttgtaataatgtacgaccagatgcatctctaccactacgggaagattttctttgttttggagattgagaacgtgagttatctttacccttactagtttttgcaagtttatgaggggtactttcactgtgatttttaacatcaacaactgcctcttcatcagagtttgtagcttcttgaagcatcaaatgaagtcttttagctttacgtgatgggacaggtatcgaatcttcaatatctgtttcactttcttcatctttatcaactgtttcagttctttttcttacgattataggatcatcttcatcatctatatcatcttcaatatcaccttcatctttagaagtttccatcttttcaggtttattactttctatggtttgagttttttctagtttatcattactctcttcttcatggtttgtttcgaacttaaaatcagatttaacattatcattgatatcattagaattttcatctacatctattccaaaatcatcatgtttttctactattacttctgtatcttttgattcttgatcagtttcttttaattcaagttgttgagaagacttatctttagtttcagatttagcttcaatttctttcttatgtccaacttcatttttaagagtttcactatcttcatttttatgttgacttacagacttccttcttttcataggttgcaaactattcaaatccaatggttttttttcgacttcatgtataaaatcttccttcttctccttagcaataagggttttactttttgaaaaaaaactgttagaatttgcactagttggatttgaattattatctcgtctactactgaaaagttttgcactgttaaacgcttgttcaggtttggtggtgggttgttcagaactcgtcgttgaatctattgctgtattattaggtttattaaaattggtatttactgttgggttatttgtgtactctttatgatataatacattagatgatgaatattgtggatattgagattgatattgcatattattattattcatttcattttctccaatagaattagcattatgatggggagtatatgaattatgacgtccattgtattgattactataaccgttatgattgttataatggccacctcgggagtatccatgccctcctctgtgatgagaattaccatacccatgatgtcccatatactgattattgtgaggtttcccgtggttattatgatgatattgtgagttattcattctataatagttgttgtttgtagagccttgttgatttccttgggaacctggcggcccttgacgacgatatggatttcctgacatttttctaatttttgttatgtcaataattcaacctaatatacaaactttgtttttttctttatgtgaaaagaagttaatagatacgttttttgtttgaaaaaagtagcaaaagccagatgccattaccagacttattgattaatttcgtaaaccctgtgaatgtttttcctattataagaataaagatgaaggttctcaaagtttagaatttcaaacgtcgcgactatttcggcgtgcggccgagaaagtttcataaagtttcagtttgctctctttatgggtactgcgggtgaaagatttttttgttaaatcaatatattttcatggtttttacttcagggaggctgttatgcatcatatggtacatggtcaaagacaccagtgataattgaggaatttcaatgaagatgagtcctgtaagtatagaggataccccatcactgactgaagcagaggaaattagaactcatactgttcaagctaaacgtaagattatccgaaatagaagaattaattcatgtaaacgatgttatggatataaacgtaaatgtgataaaaataggtcaggatgtgaaagatgtcgaaaggccaaagttccatgtgaatattatactatggatggaataaagggtaaaaatactagcacaacattagaagatcatggtaactcctcagaggataaaacaagttcagatgaaaatcacacaaaggcattattgtcttcagctctaaatacagagattaatccacaattgagaagtacagaaaatcagaatttcactctaattattagtgcaactggcgaatattccaaatttttcccaacttgtgttttcccatactatgaacatcaagctaacttaacgttattaaccagttataacgatgcaatctgagaaatcaacggccgttttcaatttttcacaaatcattcacccattcaattcaatggatgatattagatcgaaagtaccatctcacgatatatccgattttctagttgatcatttcttcaattatgtttttccttttgtaccgattgttgataagtctgaatttctttacgaatataaaaaatattggaaacatccactgaaattcaaagataaaaatttcttttttgttttattttcaatttatttcactagttcaactaatttgtttttgttaaaagagttagaatctatgagacactttcaacgatcgagtcatgataatttgttttttgatttggattttggtgttttaagaaatacttgtttccaatgtattgagaatcttaaacattttctcaactcagattcatcaccctctatatcgcttatcattggacttactctcatatattatgttggatcatcaaacggatttgctacaccgatacaagttgcaaacttggtaaaatattcacaaatttttggtttacatcgaagtattatcaatggatccgactctttgccaatgagggatattatttacagttttgtatggtatctagatggactttcggcatattattcgggttttcctccgaatatgtttagtgagttttttcaatgtgagcattcatctctacttcaatctgatgatatcaatattatatttttatatggtagattacaaaatatgaaagtttggaataaaagttctttctgaatttaataaaatcaataaaacagataaaagattgtattgaagatattgaggaaatgtatttgaactcaatagcaattgttaatttgattaatcagaagattttgaattgtgattatcgaaatctaaactatagaaaatggttagttacaggagacaagattgggcctaagaaaatcttcgttgatgtttagtgccttaagatgttcattatcatacaaacattttaacaatagcaatgttgataacattacgtcagaacttgttttacaatcaatgctattagttaatgaatccattcttaaattgaaacttggggaggaagttatgaaagaggccttttggttttacagatatgcaattccattccaagcaatgtacattgttctttcacacattcagaaatttccagatatatccctcaatttttccatgctatatgatgaattggaatacacaactagtgaattgttggatatcgattataccaatggtgatttgagaatgaaattaattgataaatctattgaaacattaagatatttagttaaattttggcatccagcacatgcagatcgttttgaaagaatcattaaatttagagagtttataagggagaaggatgaaactttgcacactgaagaaagacagggaagtcaagcaccatcaattataaatatgcaaaattacttaaacaaattcaatagtgtacttcaaacagctgcatcaacatctgaatatacgccttctacatctgatgaaacgtcacctcgtcatgttgaatctaaagtgtctgaaaaagatatgaataatgcaattaactttcttgattactccggtctgtttgatgatacttacgaagcatacgcatttcttgatgaaggatcaaagttttggtttggtgatatataaatttgttttttttaatgaatgctttctaaatagttttataggaagatagaataagttgttacctgctaattagtttttgaaaatattgaaaattgattgagttaacattcaaagttcacaccaaacaaaattttaatcaattttcgtgggatatctacaatacttgaatagttctaattagtatcattggaaagatagaaatctctatatccatcaaaaatacttgttatgtttaaaatgagttgcttaacatcaactaataacattatttactatgggaaaagaagattttgatgaaaaatcgaaccatttagcttgaaaaatgcggcccagaaatcatttttcaaatctgcggttttaaattcagatctattttctataaattgatccggtatttctatgctgtttcttcttttgcatcaacttaagcttattaaatatgcaaaaaaaaattaaagcaaataataataaatgactaaaattgtcgttgttggtgcaggtgtaattggtttgaccactgctttagaattattgaaagatccaactaatcaagtcactattgttgccaaacaatttccaacggactttgaacattcttccgtttacacatcaccaattgcaggcgcaaactggctttcatttgctgatgatggatgatactttcactcaaaatattgataaagttggttacaaaaaatatagagaattgattaagaatgctcctgaagctggggtaactcctcgtactgatattacctatgttacaaaggaaaggtttgaagctatttataaaggtgttaaaacattaccttggtattgtaaaggtgaattttcaaaagttgttggatttagagaattagatccatcaggagtataatacttctaaaattgcatatgcatatcaaattaatggtttggttgttagaacttcttactatatgacttacttaattaatgaaatgtggaaattaagtggaggttttgaaactcctaattcaagattttcattacgacgtggttcagttaccaaactctctgatgcatattcattacatcatttaggtactgctgatttggtaatcaattgtacaggtttgctttcacgtgaattagaagacattgaaattgaagagaagagaagaatttatccagtccgtggaatcgtttttgttgctgaaaatactacaggaatgaaatgtaattcattaatcgatatctttgatcctaaatatcctgatgaaaagctttactttatgcctagacgtgaaggtgagttaattatgggtggtgtctttcaagaaaatgaagaatcaaaggttgttgatccaacatttatagtaagaatgatcaccaggtgtaagaagtatttgagtcaatataactgggatgatttgaaaattgttagaacacaagtcggatacagaccttttagaaaaggaggttatcgtattgaaagagttggtaaagttattcattgttatggtgttggtgcagcaggttttcaatcaagttggggttgtgctgagagggttgttggtttagtcaatcaatataaatcaaagagtaagttatagatgtgtatctgtataatatctaaataaacatcatatttattttaataaacatcatataatttttggaaaatgccaaatgaataaatagttccatttaaaatgttctatatcaatctatacataatatgtttttataaatttagataataaaaactagttaagcctctaaagcatcaacttgagttttataaacagcattagaaactttgacaccccaattccagtcaggatcttcaatgtattcaacttcaccattagttttaaaaagtctgatttttttaggatcatgagttggccattccttaatatctgattcaaaatttaagaatttaacgtaaggtactaaccaagcattaagtgattcccgttcttcttctgtgtaacctttatataaattgtaaaaccaaacagataaatcaccaccatgaggaactttccaatctttttctaaatgttcatctaaccattcagctctaaaactaactctataacggaagatattttcaactgggaaatcattttcaactaatttatttatcaaacctctagcagatgagtaaacttgaccatcaccaacaatattaccatatttaattctaatagcttcacttaattcttcaggaggaatatctttaaagtcttccttatttgcttcatataaatctaataaggttggaacaacacaacgtggataatagttttcaacttcaattggaatttgttcaattgtctttggagtattcaataaagaatatttaaaacattcattatcaacttcaccattaagaattcttagacctttttctttcattaaaattgcaaatttaccagtatgtaaatctttaataatttgttgagtaataaatttttcatcagtgacagctctaaaagtatgtaattttaaagttggaataaattcttcaataaaatcagtatctaaagctcttaatttttccaatttttcatgacttgataatgatttatcaatatttaatttttcaataatttcatcaaattgttcctgtgtttcttcaatagtttttggttgaatataaactaaatttgaaaaaaatgcacattgtttaatgatttgtaattcttcaggatgatataattcatatgctaattgaaagaaagttgaatatgaacctgctgaaataccaccaacggtaatttgttcgggattaccaccaaaatcagcaatgtttttataagtccattcgatagcttttctttgatcccaaaaaccaagattagaattatttgaattttcttctaataattctttacatgataaaaatccaaacatattaagtctataacctggaattactaatatgaatttattcataaattcatcatcatcaaataattcaggagcattgaaaaattctgaatttggagtattatattgtaaccaaccaccatgaatatagattaaaacaggccaaccttcctttggtttatttttatcagatactggaatataaatattattatattgaataatttcttcacttggagatttaaaatatctaaaatgtttatttggaacagaaggttgaggacattttaaaccaaattcagtataatcaccagtataatcataatcatttggtagttcaacaggtaaagtaaatcttttacttttttcaattggataagcatatggaacttttgcaaatcttgtgaactgttttattacctgtacgtggagatgtgaaaacagtacctgtaagtttacctttgttaggtatttctatagtagttgttgttttataatccttggagatattttgacccattggttgttgttctttgtaaatagaaagagataatcaacctcggtttaagctgggaaattgtggtgttaagtatactgtttcaacagtcagaagataacgattcttaaaaccgcaaaacagtgaatataagtattaaaacccgctttctcaaccgctatttttcactggcagtgtcgtgtgtcggctggtgaattgatggaatcgagtagactgtgcatcgatgttaaataaaaaaggtggcagctatgcacaatggattattagatgtaggtataattattgcatgtaagaagtggcttcaagttactttaagtagaaataataaaagttttttattagtgtacaaattatagtgtagttctgcttcttaaaataccaaatttctactaaatgcgacttggcaaacgtattgtatgataaaatttagatttgtgtgtaaattggtggaggcgaggcagatctggagatttccaagtcgcagagtttcttagtaagcggttttcaaatatgaaatgcaatttgaatgcgaattttgaattttttgttttgttggtttatttattgttagttttcttaaagatgcttaggtaatatttaagctggggggttggttgtttgtttacaaaaagggtttaattattaacacgagaggggtcttgtgtcttactattgatgaatgagaccttagaatgtagaagataaacagtagatgaagggagattataattagattacaagatgttagtaactcagaagataattaattctttctatagaggtaggtagcagcttacggttttctatgattacgtgattattggtaagattgagtttatttttagtaattaaaatggtatagtaattaagatagttagttaatatagttaaacaagtagaaaagatttaaatatgtatacaatgcagttgtgatgagagtaaagagaaggaaggaaatagattaagagtttaagaaatccccccattcaattaattcatatattagatttcaaatttggacttatttgaggtacaatttctttcaatcgattataagcatcattataatttaaattataaaatttcatataatatgcaattataagtgaagcatgaacgacttacaccacattgacaatgaattaaaatttttttattagcttttaaagatttatcaattattgaagttaaatactggaaatcattaaataaatgtgaattatgagaccaaggtataaaataataatcaattgaatttggtaataattgtgaataattagttagttcctctgcaacattaattataactgaaaaatcatataattccttcaatgtaggctctgaataaaggtacaaatttggatttaatacacatattggaccatttggataattttcacttgaagtagatgatgaaattgatgaattttgtattgttgaagatgttacagtttgaggtttaagtggagaagacggtagatgtcgagatgggtttggtatatttatatgaggtggtttaggtggcattattgatagatattgatgtagagattgatactaaaaagaaataaatatatcgatcaatcgattataatataaaaacaagttaaaaatggaaatctgaaaattcaaaaatattttccacagcaacgcgctctgtttcaagtttctacttactttacttacttactttacttacagtgtacaatacttctggacaatgatccattaccaccaactttcttaacactgtattccacttgtagattctgtaaccatgtctcaaagactgctatggaccctcctactccaaaatatacatctttggcagctataaaagtatctgtttgtccattggttaatttacttactattcctgcaactattggtaatgtatcatttgaataaataccttcagaacataaaactaatctatttttatattcaattgtactattctctattatttcaacatattcattgccccatcctcctgatataagatcaactgaaattttattattatataaatattcttcaacccatttaattaaactttcagtaattacaatttcttcatctctaataacttcatcctcttgtaatttaataaatgtttctttatttatctttttcattaacattaatatcatattaggtattgtaactaatcttaaaacatcataattataatcacttaagattatttttaaaccattattgtttaattgattatcaattaaacgttcaataattctaatacttggcattgcattaccacatcccatttcaattattgcattattattatcaatattaaatgattctaaatactctattaaatcacttgcacattcccaacttttaagtcctccttcataaatacctttaattaaatcatcttcacttaataaataatttatactattattaccattatctgacatatcatcttcactcataatttgtcctctaacatcataaattgtccttcttctcattgaaatacctcctaaaactacattttcatatgaaattctaatatttattaaacttttcaaaatttcatcaaataaatgaattttcggtttgattatttcattatatgaattcaatggattatcaacttgaactatctcttgatcttcttgatcaaaatcaaatttaaaactcattgtttaatggaaaggaaatagaagaaattaaaaaagtgaaaaaaaaatttaaagtttcgatgttaattttccgacatgaaaatcaaattcaatatatcggattttaagtttacagatcagcatcatctttttctaacaacaatgcaatgaattacttacaagaaactaatgcaacagatacacaaatattagatctacaaacaccaatcaagaaacttaaatttgaattaaatgatttaaattctaatatattaacaataattgaatcaaatacatcaattataaatgaaaatttccaaaatttagataaattatcaaatgagttatcaatcaacaaatcatttaattatttgaataattcatataatagaattaataatgaaattctaaatccatttaatcaatgtaatgaaattttaattgcaattaataatataaataaaacaaataaaaatttacgtaacttatcatatttaattaatattttaagtaaaattgaatcaattgataaaagtgagaagagtttatcaagtaaaccatttaaaaatttacttaatttaagtaagttaataaatgaatttgaaaataatattaaattagataaaaatttactaaagataaatataattaatcaatataatgaatatattaatagaatattgaaaaattgtcaattaattataaataataatattaataatatattgaagtttaatgataataatagtgatagtgataaatcaattttaaatcttgttaattcttcaaagattttaaatgaatcaaattttgatcaattaatcaaacagattttcaattcatgtttaaattattcaataaattcaattatacgtaatttaaacaattccaaaaatttaacaaaatttatatcatcattaattaaacctgtaatgatattaataacaattaatgaaatttcaaattctaattcaaaattggatgaaatttattggaaagaattatcaatttcaatcaataatggattaagagaagtaatttcaaggggtggaccagttttaaaaaacttggtaataataagggaagatatagttagttctattaataaactatttgaaaaagtttatcaagatgaaaatattaggaaaactaaaaatattcagttacaaatgatgattaattcattaagtaatttccaaaaaaggtaatatacagacagacagacatacatacacacaattattcagttctaaatttatttgttgatgaagatttatttgataatctattattatttgatcttttgaaagaatcaccaaattttactttacttgattttttattcattaatctttcttttgataattttttacttctttccctagctaattctagatttttattccattcagcaattctttcacgacgaaatattcttgcttcacgtttctttttaccacctcttattcttttctttatttttgttgttttattaatagaaacactattccaatcatcaatttgtttattaaatttatttaaatcaattaatctataatttgttaaaattttaaatttattaacccattcataaatttcatcaccagaaactgcaacttgattaactcttaaatcatgagattgttggaaatatgatttttttgatttaattaatgaattatgattattaacaatttcatcatatttattacttggtaaatttgtaatatcattactaattatataatcatcatcattatcattatcaatttcatcttgattatttaattcaattttaatttgttcactatttgaaaacaatgggaaatattcagttttagttttattattttgggtatcatcattatttttactatctttatcactatcattattatcactcttattatcatcaccatcaacaatatctactatttcaaaatcaaaaccaggaggtggggttatttcataattattattaatattatcttcatctatttcaaaatcaaaacctggtggtggtgtttgataatccattgtttgtatagttaaagaagttgtttgtaatagtaagtatagatctgaaatttgaaaaattcatgttacgtgaaaaataaaaaaaattttgcactataattattttaataaggtcaaaattgaagatattgatattgataatatataataataataataataataataataagttaatgaatatataaaagattgtataaatatataaataatataaataatatatgtagataaagaaacttatctataaggagcatcagcatttgcagcatattgatattcttgttcccatttatcaccatttgctaataatttttctttattatataataattcttctcttgtttcagttgcatattcagcatttggagtttcaacaattgcatcaacaggacaactttcttgacaataaccacaaaatatacattttgtcagatcaatatcatatttataagttcttcttgaaccatctaatctttcttctgcttcaattgtaattgcttgagcaggacaaattgcttcacataatttacaagcaatacatctttcttcacctgaaggatatcttcttaaagcatgttcacctctaaatcttggagatattgcacctttttcaaatggataataaattgtataaggagctctaaaatacatttcaagaacaatatacatacctctaaacatttcacttaaaagaaaccatttagttgccttggaaattgcaccttctttactttcttcccaagttttaggtcttggaattctaaaaccttcaggtctagttgcaaatgaagaaccagcagttgttgaagctaatcttaacagagaagtagaaggtgaagatatctttgatagagatgatatattacttcttaatatactagatctgagaaacattgttgattagttgatgaattaaagataaatataaataccctataataccatgcatgaatcttcatgtaatacctatacttcattcccctcttaactaataataatacaatttcaaacattttctattcgctgatattcattattgcactgcgtcgatcgtctcttattggcctctttcttttctcagtgggtcggtgcgtcggtggggtgttctctttctttcttaattttcttgaaatttttctcatggcatgtttatattaaactgataaagggtaaaatataaacagtatatatgctattttcattttaatcttaaatatctttctaataaccacctataatcacacttaatctctaacaaacaatgttaagacaatctgttcgtaatttctcttcaactattaaacctaaatttgctaaaatgaccttaattggtacaattggtaactgatttacaaaaacaatcaacttcaactggtaaagaatttcttaaatatgcaattgcagttaattcaaaatcaaaaaatggtgaacaatcggtttcttggtttaatattgcttgcttcttacctcatcaaatagaatttatggaaaaaaatttagcaaaaggttcaaaaatttatctagaagctgaagcaaagaatacttcttatgaaaaagaggatggttcaaaatctttttctttaatgttatttcaatcaaattttgaagttattaaatatccaaaaaaggatgatcaataaatttaatttattattcattgttcctatattttatctgactttgtatactaaatcttttaattaatatttactcatttgaatttataatatgcatgcaattatattttatgtaaaattattaattgattactattactatagaaatatttacctaagaagtttaaaaactaaaatacaaattaaaatacaaataattcactaccaccactaccattactaccacttctagtaatataaatacttatattcatcgaaatctttttcacctccatctctaataacatccctctcagcttcctgtaattcatgccttaaattctcatcattatatgaataattatgattaatagtacttggtgtaattggactgtaaacttcttctctaatcttgtccattttatcaattgataattcactatttaaatcattaatatatttaccaaaatctccttcttcatctctaatctcaccttcctcttcctcctctttatcaaaactattaccttcattatttcttctcttaatcttaaattcttttaaactattcatttcaaatccttcacttttatcatcataataactttcattatctccttcaatatcattattccaaaaactgaaaatatatttactttgatcattaatcaatttatctccaaataatttgaaaaatccatcctcaattaatccacattttttaataatccattcactatatggtaatttattcaaaattgaaatatacatttcctttgcatcttgtccaataccgaaaagtaagaaactaataaatgatatactaactaatgaccatctatttgtataggtttgtcccttatgatctaaaaagaaaattgtattaaatggaaaattactggtggttttaaattcttttttaatatttaaatttgatccaataacacatgaaaaaacaattgaaattataataactaaaatacaataaactaatagtctaataaatcttttaactgataatccggaatttgtacattttaaaatttctcttgctgctttccttttcttaaaatataaaattaatgtaataactgaaataacggtaccaataaaactccataagaaaacccataaataaaatacaacaactgaaattgaatcacttgtaaatgttggtgaacatcctgtatatcttgtaattgaatatcttgtaaattgtgcaaaatatgaaatacctgaaattaaaaatgggaaaattattgaacagaaaatttcaatacttggctttaaatatttatttgagaaccaaattgttgtaattttatttgttaaaaaaatcattaataaattaaaactaacacatgaaattgttgatgaaattccaatagaaattgcaatttcaaatctaatcattaaatcacaccaaccttcacctttccatttattaataaaattatcaccaccccaaataattgctccaacaaatccatcaatcatcataatttctaaataaattaataatgtacttgcaggtatattcctgctcattatgtgccatgttaatggcggtatattaagtataaagcaaattgcttgaattgaaataaatgctgcctgtaatcccattgatttgttgctttaaaagagatatctttaaaagaataaccttccttttcctttctttttcatttaggattcatatcttcatttatttaatttgttttaaatctttttcacttgttttacatttcagtttgatgatgaaaatataaaggaaaaaagaaatctttatgtttcaatggtttctcttaggatgccgaattaggaaataaaattgattaatagtaagagaatttctttttatattgtaataccgttactgttgcataaccaaatttaaaacttattgctgatgtatcgtaatataaaacctaacgggtgtttatatgatgtacaaattaggaaatgtaattgactaattcatgtcattgaaatgcaccttatcatatatacataacataagatctttgaattacttcattttataatctaattataatccccccttcatttcgtcttctccattttaaggtataactcaactatcgggacattaatggtatattaatcctgtataataaacaatcaagcactctccctcttctttcatatacttcccagcttaaatattacctaagcatctttaagaaaactaacaatgaataaaccaacaaaacaaaaaattcaaaattcgcattcaaattgcatttcatatttgaaaaccgcttactaagaaactctgcgacttggaaatctccagatctgcctcgcctccaccaatttacacacaaatctaaattttatcatacaagtaacgtttgccaagtcgcatttagtagaaatttggtattttaagaagcattacgtaaacttatccttatacagtaaatatctagataatgtctataaaattcattcttttgaatacataacagctaatgatataaccataactattaatatctgtccaataaatgtaataaggtatctaaaacaccattttcgaaatgtagaattaattctataatgtgcattaaatgaataattgttatttttataatttttatatgttgataattcatttaaagtttcagaacttttcattgcatatttattagagaatggattttctgaaataatggttggatatatcatcatcaatcttactcatattatccatagaatattcttccatttcattgatttgtaatttatatgccctgatcgatctaatacgaataaaccaaatataaaaatatgcaaatgggaatattattccaataataaatatctattcaataaatatcatgttagtattttatttccctgtatgtattttcataaatttctatacttacattaatcaaactatttaaccatggtttttgaatctggcatgcattacaaagacattgttcttcattaatttcatcgattgttgatgtattgctttcaagggtataatgatgatttaatgttaaacgtggatcttcctccattttagttgtactttgctaattccagaagccttatttccattttcttatcgatgagtatagacttatctattgatatataaactattgtaaagctcatctcatatcaggtatcaaaatcataaaaatttccttttttggactcttcaatggatatcaaaaaaatttaactagttttcaaacactgttacattgtttgagtatagtttcaaataatatgttatatactcacgatgatagtataaaatagacttcgacatcaaactgaatagcttttgaaaattctatcaatggaaaaatattactttctcgatctacctccaagacatttatcaatatgagcaccaaatctactacctgcaattttacgatcacaatttgaacatttaaaataagtatcttgacctgtacctggtgaaattaaatttgcatattcacctaaaattttactattattgttcaatgcattaacataaatatctttaccattaagtaaaaattcaaaccttccaatatctggttcctcgtattgtttaatattatctgcattaaggttaatattaccaaattttttaccattagtattaacagaatttattttattctttttatacttcccattactactcttgattatttaaatttctttttcttgagttaggtataatttcatcttcactatcttcatcactttcatctttactatcatgatcatcgtcatcatcattactatcatcattatcattatcattattattatcattattatttgttctgttctttttctgtgaatcatcggtattcttcttattttcaaattttgctgtaaaatatggtgaattatgtagaattggtttatcaatagtaccatattcactccgtataattctctcattcagtaatgatttacttataatattatgaattatttgatcaagcatatcatctaagacgctaccacaaaacgattcgtatgttagtggtttggtttctgtcatttctctctatttctctttatttccttctattgctttctttaatataatcctaaaatatggtataagctaattgataataagtctttgcttctaattaccagaaccactctataaaatcagttaaataaacttcagtacaagagagatcaaagcaagcacaagaataatggagaaaagcgaaattttacctgtactttttatgttgaaaaattatttaaataccagtcgttaatgtcttatataccgattactgcctcttctaagatatttgtttatgtattctgtagaacatgtatggcattaaaagtgttaaatacttgtaattatatagattatgtaggagattgcaaaacatcttatagttgtagacatattgcaacaattccctttaaatatatacgtattttaaaaatcagtatgtcactgattattttttagagtgcattacatgaaaaactgacatatacggttgacacaattgtatgttgcctaacacctttcacatttctttatctctgtaatgttattataaacaacattttagggggtatttaattaagtatggacattgaaaactactctaataatcaaaatggttcacccataacggattcaacacctgaatctgcatcctgaaccaatatctgaatcaatttcaagttcaaatttaagatatagtttaaattctcgatcaagtgcaggtttagttacaattgactcagattctaatttaccaagtagagagacttcagcaattcaaaagttatcattggggaatggtaatttagaagaattctcagatgattcagatgaagaattacaggattggtcattattaaataatatttcaaagaaaggtatgaaagatttggaacctttattaactgataatgataaatatacattatcagcatatgatcaaaataaattaaataaggcaagaaatttaagatttcaagcattagaatctaagagaggtgcaattgttaatttagataatttaaaggcatctacaatttttgttaataaggataattataatgatattttcatgcttcaaccaaaggggaaatttttagagacaatgggatttatagataatcaaaatatttgtcattttggatttgaagaggcattatatttagttgaaagaggtagttgtatgttaaaattttgggataatgaaaatgattcaaagaatgaaatatttgaaaaaatgcctcctctaagtttacaatctgcttattcaattttcattaaaaatgaagaacaactgaatcagtatatggtttattctatattgaaaagggatggttatattatcaatagaaatgatgaatttaatggtataatttcaaaaagaaagagacaactttttgatgaagatacactatttaagaatgtagagatgtcaagatggacaaaattcttatttagtatttcatcaatatttaacataagtttcccatataagttagcattctcatattttaatatttttacatatatgagatccacattaaaacctcaatcattaccaaaacttaaaaatgttaacaatgagtcaacattaaacaatgaaagttgtaaagaatttaaaatatcctttaatatctggaaaccttcaccgaattttaaaaaaaagaatccaccattacctgactatcaaattacaatttttaaagcaaatcaaaaattaccaaattacttcgaattacagtcattattagaacgttcaaattcaaatccagatacttataaacctaaaccaaaagtaaggaaaaataaacctaataaagttccagacaataaagctaaaaaattagattcaagttgggattatgcaaagggtattaatatggaaaatcttaagtataatcaaaatcgtataacacttgcaattgttgataatattacaatcaatttcattacattatctcattgtagttttgttcaagaaggtccggtatggagagatcattgggttacttggaaaccacctgttaaaaagaaatctacgcgtaataatttcaaaagaaatgaaaaatttaaggataaaaagtcaaatgaagatataataggaaaggaaaatcattctaaagatattaataatggagatatttctgaaaataagatactaactcctgttccaacaaataaaaaaattgagagcaatttactaatatcaaaaattttaaatggtgaagaaggtaatctaataacttctaccaaatcattggagaataaaccgccaaattcagcacatttttaagctatagaattatctttaagtgattttttattaatttatagacacaataacgtatatattctgggtaaaaaaacagttcactaataacgttctttagtgataaagtaaattgttataaagcaaattaaaaaaatagcaccggttggtttcgatccaacgacatcagggttatgagccctgcgcgcttccactgcgccacggtgcttttcttgtgtttacattagctaagcttttttttgaagtgtaaatgttcaaaaaaaaatcttgtggaaaaaaaaagtgactaaaaatttgactttcaatgctaaggtgcttaataaaagatacttttatgtgtttaaaatattgttccctgctcagaatttagatttaataccatttttagcactttttaacacttttttaaaatttaaaaattttaaggaaatagtatagaaagacaaaactggagaatatttctggaaaatgaaaactttttgttgaacactaatttaaaaccactaataattttaaattctcaaaagaaatgcaaaaagagtctaattttgcatttatccaaaagcttttttaatcaacataacccaaaatgcacaatcaaccaatctttacaatgctctacataatctactcttccattaaatctctacagtatcacacaaaacaacatcaagatatatctaacacctaattgataataacatcgataaagagaattaataaattaagtaagctcagtcgtattaaaaatatctgaaaattcgtgtttaccttttccctttttcagttacctaatattattgatgagtctcttttatgttactgatatttggaataatataatgtttaggatcaaattataattataatctccttcattttcataatactctttgcaacatagactatcgtgagtcaaattaaaatcataaacatagttacaaatacaatcatataaaatatagatatgaacttagatagtggtcaatctaatctaaatgaagtagggaaaccgaatgattccaaatcaaatgaattaaaaaagttaaaagagtcaaatgaatcaaatgacgaaacccaggaattgcctagttttgatatttcagataattcctttgatggttcctataatggtgatcttgatttatcatctacacctgaaatcaattctagtaatgatagaaatactgatggaaaatcattatcaaagctttcaaatgatttatttggaactccaagaacaattgacacgagaacttctacaatgacttcattaaattttgaattcaatccaaagttccagcaaagtgagcttcttattcaatcagctatgaaacaagaaataaagacagacaatacgtcaaataaatctgttaatcaacccactacttcaattacaaaacgcttaagtaggcaaagtaactatgaaatatcagtagataccgatacggagattggtgactataatagttttagaaattctttacctccctataaaactgagattaataaaaatcataatgatatacttagagagtttaatggtccagatatgattccttcaattactgaaataataaaattacaaaatgagttaacaaattgtaaagtacaaattaaaatacagaatgattttttacgtaaaatgtataatgaaaatacagaaaatagcccaaataaagaagaattgtcattagaattagagaagcaaattgctaacagtataagttcatcaaattataagacaaaacttgaaatattgaaagttgagtatgatagtctaaagcaaaatcataatatgatagttaaagaaaatgagaatataataaaccagttggaagctacacagttaagccatcaagaacaaattaagtcacaacttgaattaaaggaacgaatcaacaaattattacagaataataaattaactgtagtagatgaagttaaagatgaagataatgatgtaatacatcttttagacaaccatatgaaaagcttaacaaaggaaaacttagaattgaaacatatagtcgatgtttatatcaaggatttaaaaaacagtcaaaagaaagttcaagacctttcaacacagttaaaagataaggatcaaagtgtgaaagaactacagtcagaaattgataaaaaagtaaaggaatctgaatccataaatgccaattatgaatttaaaatatcatcttttgaggaaacttatcaaagtcttatgacaaagttttcaaacctaaaactggaatatgacacactcaaaataagattaaatgaattgaataaaaataatcaaagtttgaagaaaagaaacgaggagttagaattaaaagtaaatgaaacaaataaaataataaaagaaaaagtcaaagaaaatcatagtttaagaaaactcaatgaatcagcaacaatggaatttaaacttcttttagaaaattcatcgagtttccatgcaattcttattaatttattaacaaaactgattgatccaacaacatcaggtgatctgttggaggaaattaaaaatatcgataatgaaacaaattttgagaatatttttaaggttttttcagtaactcaaaattatgaaattgaagctttatctaatattatagagaattatactaatatttccgaaaagatgaaaacagagagtagtaaatcagataagattattgatttaaaaagtcaaattacaacattgacaagtaaattacattcattggaaaaacataatgattcagagagaatcaaaatccaagaacttgagaatgaaaactcaaaacttaagcttactctcagtcacaaatctaataggattgatgagttgaaaaagttaagactggaagatttatcacaaaaatggaagactgcagaggtggctctcagtcaaagtaaaaggggtgctcaactaaaaatttctgaattagaattagagttaaataaattggtaaagaagtttgacagtctttgatagatctttgtaactttacttcattaaatttaatttatataatacgagaatttttttggcattcaaaagtagttttattttaaaagagaaatgcatgattaaacagatattatactcctgttatataaaaaagagtgaattataaaggataggaaataagacagtttaatcatgattccatttcttcatcactgtcactgtcactatcactatcgcttccagcttcagcttcttcagcatatttctttgcttcagcaaataagtcagccggaacaactttatgaataccattagtttcagaggtacttacccaagttatttccaattcataatctttatctttattatcttcatgaactaaatgtataattcttgctgcttccttaactgcatctctagcagaaatatttggcagatctaatttttctaattcagcctttgcagcttgtctacctttacctgttgctgtaccttgataaccccaatatacaccacttggctcgaccatatataaatgtggaccagtttcatcaacacctcctacaattgcattaataccgaaaggtctaacagagttataacaagtataagcttgaacataataacctaatttacttataagtccttcaagtcctattggttctttgtaaatagatttaaaactttgtgcttcatttctaccacgattaacaaaatgtcttccatcgggtattaaacctgaatacacaacacctacatgtctgtcaattgattgtattctcttatttttacctggtgctaaaagttttgatgtgataattttctcagttgcaaatacaacaccatcggcacacttgatacctaatgaagttcctgaattctcaacagcctttgaagcgtattcaacttgaaagtttctaccatctggtgaaaagacagagttagataaatcgtaaccggtaccaattgaagtctataaaataaaaaaaaattatatgttagtatctcaatccattatgttaaaacagagcaatcttgaaactatctaattacataccattctatgtaatactgtgtggttttaaggagtttacaggaagaagttaatacagttgaagtctctctgaaagagtgtaaattgatttgccctccattaatttttgtcaacgcgcagtagtagagtgaatcttgaatttttactatggtacattcaattaaggacactttgctacatgtacattactgttatatatgatatgaaatgatactatgattagctctgtattactcaatttcatcattatcaatggacactataagagtggttgtatgtggagatgaaggtgttggaaagtcatcattgatcacatcattggttaaggaaaagtttgttccaaatattcaacacatcattccaccaatcagtattccaagagatttttcagattcaagatattctgtaaattctacgatattagtggatacatctgcatcaaatctatcatcattgcaatatgaaatacgtcaagcaaactcaatttggcttgtttactccgatcattatacctatgaaagaatttcgctatattggatcccattgttcagatctatgggtgttaacttaccaattgttgtatgtcaaaataagatagatttagatataagtgaagattcttcaaatgcattacatgaagaattcatacctttgttaaaggactttaaagaagttgaagcttgtattagatgtagtgcaaaggagaattttaatgtcaatcatgctttctatttatgtcagagagctataacacatcctttgtcaccattatatgattataaagatggatttttgaaaccattagctatagatgcactcaatagaattttttatttatgtgatagagatcaagacggatatttgagtgacgaggaattctcattattacagcaaaaatgtttcaataaatcaattgatattactgatttacaaactataaaagatacattgaatacattagcaaaaggatctgcaaatgagatgggaatttcatctagaggtttcttgatgttaaacaagttttatgttgaatctgggagacatgaaacagtatggggaatattaagaacatttcattataccgattctttatcaatagatgataaagttctttaccctaaaattgatattcctcctcattccagtgtggaattgtctccaattggatataaatttctagtcaatctattcatcttgtttgataaggataatgatggtggtttaaacgatgaagaacttgcatgcctattttatcctacaccaggtatacctaaaacttggaaagatactaattttccaagaagtgtggtttgcaatgaacaaggatatgtcactctacagggttggttggctcaatggtctatgactacatttcttgactataaaactacatcagcatatcttggatattttggttttgaatcacactctaattctaactctatttctgatgcactttatgttactaaaccaagaaagttcaagaaaagaagtgggaaagtttatagggcaccagtatatgatagaactgtttttaattgttttatcattggtgcttctggttgtggtaaaacttctttattagaatcatttttaggtagaacctttagcaatgttcattccccaacaattcaacaaaatgttgcagctaataatgtggaattaacaggtggtaaacagtgttatctaattttggaagaattaggagaagtagaaagcgcaatattagaaaacaaagagaagctagactcttgcgatgttttgtgctttgcatacgattcttcagatcctgactcatttcaacatttgattgaagtcaaacagtcttatccatatcttgataatattccaatagtttttgttgcgcttaaggccgatttagatagacaacaacagagatctgattttttacctgaaccatttacaaaatctttttatctttcaccaccgctgcatatatgttcaagttggacatcctcattgaatgaattgatgagccatatagttgaggctgctaccaatcctcgtattgcgactcctgggcttgaacccgatccatcagaaccagaaactgtattgaattcatttacaattggtggagctgcagccggatttatgattgtggtaactgcttggtatatgcgtgggtatatacccggattcagaagataatatcatttactttagttgattctatgactttttttgtaacatttatactagtatgtaccttagataagcttaaattcattaatgtgtcccaaaagggtaataattagaatttatgagaccttaaaacttgaaattttcatgttgagaatctttcactttgagctctgtccttagcaaagatataccatcaatgatatgtaatgaatgaatacaccaaaagaagtatttttcataattaatacctaccgaacatttgaatgtcaatatattcaacagttttacacgttttgtttgtagcgatttcatatgttattgctatacatctaaaagcaaaatctggggatagaaatgatccatcaattattcaatcgagacttattagagtttccattgcttcaatcattttcattttattaactaaatatgttcttatatatttattacatacgattccaaatgaaattgccttacatcaaattcttggtttaaaaaatccatttactcaacattgtttatgccaagtattcaatactttaaaactatttatgatattatttatgggtcccttaagtgaattgatactatcttttatttatagtccgagttttgaatctagttatgatagtttttacgaagttctccgtgatttagtgattgcaccattgactgaagaaatattttacacctcattaacaactgggcctttattagcttataaattatatcaaagaggtggaagttctacatatgaacctaccgtcttccataatgataatagtatatcattaattttacaactaaatccactactttttggatttgctcatttacatcatggttatgaaatgtaccataaaggatatcgtttagctcaaattatcggtttatgtggtttccaatgtttatataccacattatttggatatttgaccaacttgatctttgtaaataccggtaatatatggtgttgtttcattgctcattcattttgtaattttatgggatttcccaacatttcagtaaagggaaatatcttccatatggtattttattggttcctattgatactaggtgtaaatagttttggtgcattgttcgacaaacttacatttatagaaaatgcttcttgattaattagaaaagtgtatataatatataaatttataaatgttttttttttcgttaaaatgaatggtaatgataagattaaaaatatgattaagaggcagtagatgtaatagccaacttctgatcattagaagtttctggcaaaacattttcatctgcattttcttgctcttttgattgtatccataatgtatgattaactaaattcaaataagagtacatgaaattactcaacaatacttgttgtcttaatggtctcttaggatctgcaagtttcaaatgactgagtctataaattgcacgttcaacatgtacagggaatctatgatccaacataacgagagttgattgtgaaacgggtggaagtggaaacccaaatgccgagtctctcatttccaatggttgattaggttttgtaggtttttcattttcatctaatgttttctttaatgattgtttgataagttctgtagattcattattttcagttttttcatctttagtatcagactttataactttaacaagtgaaccaattgaccctttatttacagtgttatcattttgttttgtctcatcagcagtgtttagttcatctgtgaatgtagaagatacaacatcagtaacttcatcaacttcggagctatcatctaatctttcttgtgataaagacgagtttgcaaatggactatgatcagaacttgtggattcttttcttaaagcaacttttttgtcagttggaacctcttcaactttaaatgtatcattggcttccctttctacaatttcaacaggtgtagtttcagagacagtttcgttttgttcctcaaaaacttctttcttaacaacaccattactttttggagaaatgttcttgacaggattcagttctttagcctttacagcatctttctcaacaatttgaacaacttccttttcctgttctttttctttacgcttttccttctccttctctttttccttcttttcaacaagactatcatttgatttattcaacgtaaaaaatcctaaacctaatttaggagatgatccagcatgagtgcttgtattggtattcttggtaacacttggactactgttttcaatatgattattagtattagttataactcccttctctgtatgtaacttatgcttatccttttctttttccttctctttttctttcttaccaccaaagaatgatttaaaatcagtttttggcgagcttgatccagattcagaagtatgtgaaaatgtacgttttgacttgaatgaaggtttcttctcttcagatgtatcaatggaagttactgaactactacgtggtttatctcttttaattttgaaaaatgaagtaaatgatgttttaccttttgatttttccttctccttctccttttctttatctttctcagcttcttttaccttttctgcgtttactactggtatttcaacaataacaggggaaggtttaactttttcctctattattggtttggaattgccttcattgataacattaaccttaggtttaatactattctcttcagtaacagttgtagtagatgtatgtgcatctctggaaagtttcgattgagtgtctgataagtgaatttctttcaaatccatgccatatctgtttctttgatgggatgaagataggtgttgattttgttcaacagcatgatgatgttgttcattttgagtttgatgagttttgcgactttgattttgattgttatagactggaacagaaactacggattttttgaattcagaatcaacaggtgatttcatcgaattgtcataacgttgatgggagttggaaatgttttgatttggccgtaaatgtctatctggaacacgattttgaggttggttattataatgattattacgttgatgtgatgatgattttgatgatggtttactttgttcatgatgatgtagaggatattgttgcagaggcatgttgctgctgttgttgattgttgtgttgactttgatgttgaggtgaaaatttttgtttctgatgttgatgtggaagttgatgttgttgttgatgcggaggtaaattgttattatgacggattggtatattttggttatttcttgaaccattaaatgattgtggatattgttgataattttgacgttgatgatttatacgattatttggaattttattaccatgatgatttatatcatttctatgtaaatttgatgaatatttatcatttaaagtttgaccagttggtaaatatggatttataggttgattagatgttggtgatgtattagtaggagaagttgctgtatcattagatgttggaatatcaggtaaacgacttgaaggagacttaagttttattggttcaagttgaggttttcctaaaggtttttgggcattatggatttttcttatatctttatatacatgagcctgtggagctttattatttgttccaatgaattgaggtaaatttggaagatttggtagtgttggtgtagagttagatgatagatttgaattttgagaaatattttgttgtcttctataatttgtccaaccatttctttttaagttggaaacaaaatcaggaggcactgaatttttatcattttctagattattatccatatcaatcagatcatctcgatcaacattatttaaatcttcatccttaataaataaactctcacgtgttttactattgttcaatttatttcttaacaatatttttcttgacttcacacgagataaatcaccagaggatttacttagtttattatcattgttattgttagtatagttaatattattattgtttctattattttcatgatcgtctattaaatatgcttctttttcaattttagatataccaatcgatctagtagataatgatcttgctaaagtaactgcatcatcatcatttaaaccagcattttgagaaagtgtttgtaattgtactgttaattctttcaatgaaggattcttcattgttatatcatcaatgtcatgattattaataatattattattgatattatttttttgtacatgctttttaaaattttcaagtgaaatttcaggatgagcagttgcaggtacccaaattgattcatcaaatacatgatctgattctaaatcaacaaaatctacatcttgattatcaaaatctaaatcattttcatcatttgatattaatgatatttggagattcctttgaataaatacttttatgaataattgtttgattatctatattatcaagtgaatcattaaattctattaaatttgaatcgttattattttcactttgatatgacttgtcatacgagttattagaatttagtgaataattatcattatcattatcattattattatcattataattatcattataattatcatcatatgaatgaaaggaatgatttgaagatcgagaagattgagaagatcttgtgattgaatgtttcgataattttgattttgatcttttcaaatttttttgttgtacttgaatattattattaattgtatcaatatcatcattataataattttcagttgttggaagtggtagatcaggatcaaaattaagactattaccaattgataatcttttaagccttctaacagcattatattcttgttcaactgcctcagaagctgcaattaattcctgttgtgatgattttttgggagatgtcctctctacttccaatctagccactccagagggttccattgcaattgagtgataataaagtaagatagaagtaaaaaataattcagaaaaggatccctaattccttctagcaaccttggaagacatcggggtgtgttatttaggcttttcaagggttattattatggaaaattgttgattctcagattttcaaacatttcgcgtctccctctttttctgatcggaaatttagaccgtgattgtgatttaccagtgagtctgaaaattgcgagggagtgagaatattttcaattttccgatcaactcattccacgacatgaaaatagtgactcaatttctatcgactttttcacttcatttcatctcaccggtatttcaaatcggcatgattaatggaattaaatgattacatgtttttttttttttgattttcaattattatttgttatttctattgaggtaaggtatcacaatcatggctagagagtttacaataaaggttccagcatcctctgctaatataggtccaggttttgatgttttaggtataggtcttaatttatatctttcattatcagtttccgttaatgaatcttctccatctgaaaaatcaattaatgatccttataatgttgatttatcttatacaagtgaaggtaataatgatagtgtaccacttcaatctgatttaaatttaattactaaaactgctctctatgttttacatgcaaatggtgttcgttcatttccaaaaggtactaaaattaaagttaataatccaatacctttaggtagaggtttaggttcatcaggttctgcaattgttgctggtgttttacttgcaaatgaaataggtggttttggttttgacaaaaatagatgtttagattattgtttaatgattgaacgtcatcctgataatattactgctacaatgatgggtggtttcgttggttcatttttacgtaatttatcaaatgatgaaaatgataaagttcatcaagactttaaatttaattttaccttctccacagacttcacctgattttattccttcaaatgctcctttaaatttaggtactcatgttaaatatccttggaatccaatgattaaatgtattgcagttataccacaatttgaagttaaaactgaagattctcgtaatgttttaccaaatacttatgaaaagaaagatgtagttttcaatttacaaagattagcagttttaacttcagcagttggtgatttaaaaccaaatccaagagttatttataattcaatgcaagattctttacatcaaccttatagaaaagttttaatacctggtttaactgatgttttatcaaattttacaccagaatctcatgatggtttactaggtatttgcttaagtggtgcaggtcctacaattttatgtttagcaactaaaaattttgatagaattgctaatgatataattgaacaatttaaatctacatgatgtcgtttgtgaatggaaattattagaagttgcaaatgaaggtgcaattgttgaacattcaagtaaattatagtcactactaattttattactactgctacactttaaatatatccacaaaaaaaaaaaaaatgtttgaaccgaataaacttatttatttaatacgctgtaatttatataaacttatggtatcaatgtcaaaacttgataaaggaatattagttttgatcatatatacaaaagaaaatctttactattctaaattctgacattccaaagtttgtcaaattggaaaaagaacgaccaactataccacacagagctttgtttcttattcttttttattagatttatataatctgctatatgcttatacgacaatattagatatattaatgaacaaacacacacacacattttatgacttgaccgtgtatttgtagagtatatattattaatttacagtttgaaaggataaaataatctataccaaaagaaatcttcaacttcttttgaattctagttttcaacaataacagcaattatttaaattcaccagctttacccgccattaataaaccaacaattaaaccgaataaacctaaaacactaccaaaaatttcaataactaaaattttaacaaataatgaagaatctgctgcatctgaaattgcagccgttgaacctgtaataccaactgcaacaccacaaattaaattactcattccaacggttaatcctgcccaaaataatgaatatcctgtatataaattttctgcagttaaaatattttcaacagatgtaagttttgatgaaaaaacaattgccataataagtccataaattgcaacaacttcacaaaaaataattgagattaaattctttgtagtaattcttggtgctttaacaccagctccgagaattgttgaacctgttacaaaaataccccatgctgcaccaacaactgaaaatccaatacatgatgcaatacctaaattagcccacatatatggtgaaacattctcaagaaatgctccaaagttaaattcttcaccagaaccattaaataacatgtctaaattaaaaaatttggttagtactcctgtttttctataatctataggaaattaaaaatgagaataatacttacatcctccaatggtacataatgccacggttatgattgatgtatagacaaatgacattattattgtttatattgttgtctattgataataatttgttgccctatcagcacaaacaactcgaaagaacttttaaactctgatacagtttaaactgcatcaatttgaattgtacgtaacttcatgcagacaaaattcatgataaaagcagcctttttaaaatcgtcaaaagtcgcgactttaaaagtttatcattttcatttttatcattttattttgcttgtaaattaaagatttctatacaaaaacttaaactattataattaatctaatctatatcaaactgtatcagcgtatgctggatttttcttaaggattacaacaccttccaatgatgaactgtaagaaatgtattcatcagtttcaagttcagccttttctccatatcctaataaaacaggtgtagaatgagtaacccatccggtaatagtctttggtttaccagcaagaccaacagtatcaactgcttgaccaactcgcacattaacattaattggttctaagttttcatcaactgtaactaacattcttggcttgattgctggagttaaatagtataataagttagaattagaacttaaaatgaatgattttggatctaataatgaaattgaaacagttaataatgctgcaagagaaactttggataaactttgcttatcaattgaaaatggatttaatgtaagtgtacctttacctaaatgaactaaaccttgtgatattctagacataaataatccattttgatcattaatataatatgatgctaattgtcttaataattgtgctaatcttgcattatttgtacctgcaccaactaaacccattccaaaaattgcattatatgcaacttcaatatcttgatcatgtgaatatcttgataaagtttcgaaaacattaatttgtggattacttgcagatactaaacccatagcaagtggaacagctctctttattattgatttaccataatgcattaaatgttcaaaatgacgaatgctcattgcttgtccgatttcttcacccatacagattaaggcaagacctaaaactgcaaaaccttcgtaaagttcatcctcttcatcttctgtagtttcattattatcatcattagttttactgtcatcatctttcttttcaggaagcagagatgttgtagcttcaccttcaataactgatttcttaggatcaacaggtacatctgcaatttcaacatcattatcattatcaacactcatatcacccccatcacctaacataccttcagcaccagctgctgcctcaatctcagcttctatttgttcatcatcatcatcatcatcatcatcttcgtcatcgtcgttagattttgatttggtagtacagatttgtaataattcttgaacttgtaaaacattaccagttccagcataagaacaaattttgattaaaactttcaaagatttggagattggatgttcaatagcatcaatggtatctaaaacatcatcaacttgatcatatttacccatatagagtaaacctaaacctaaacacataaatctgatccatttggaagtgagttgttctgcgtctttttctaataaagattgtaaaatagtatctgtaatatcaccattacatgtaccaacaaatgtatgacccaatgataatgcagccaaggattgaatttcaatagaatatacaggatcattaactatagtagttaggagattcaagacattttcattttcactacctgcatatgcaataccaagaccagtaattgcagatgttacaattatttcatcactcttttctctattatgaataaattcttctaataaatagtaagttgattcaacatcatcataaacaccgttagttgaaatacccatacctaagaccgaacctgctcttaatttagcgttttcattatattggaattgatctaatgcttgtaaaccattttcagtattccaaaggttgactaaacctaatgatgcaacagttgataacataccttcatcctttgttttataaacccatttttccttagagataagtttttcatcactataacctgcattcaaaaaaccattaacaaaagatgcagctaaattttgctttgcactttcgagttttgaagctgatgcataaaatgaagtttcaagatgagatttataaatatcttcaggaactttaggagctaatagatttaattctgtgactaaatacttaaaatatttatgaagatggttattattaatacattgttgaacttcttcgtcttctactttaaaaccataattttgtttacctaaaatgaaacctaattgctttttcactaataaatcattagttgattcaaaaactgatctgaccaatgaatcatcgcctaatcttatagctaaagttaaagcttctggtaatttattatttgataaatagatagtaaaagcagtgtttaagaatgctaaatcatcaggcggagctaacaatggaacacatgaaatcatatatgtacaaactctcttgtaagtatttttgtcaacatattgtgttattttttcaacttcctcaatttctagtaataaatcgactgcttcagtttcagcattatgctttaagaaataaggtgcaataatttcacttaattgaactaatggttcttttgattcaccactatcaagatttgcttcatattgttctccaatttctaaacataaatgtcttagatattcatgaccccattcggtcatagattcatcaatattacttttcaatctatacttaagacattctcttacatattcttcaccatcttcggtagagtaagtcatacctaaaacagataagatatcatataattggatcagtaaagattcatcagcccaagaattttcaagttgagttaaagctggataaaatggtcttaagaatttcaatggttttggaacagctgtcattgaagatgtagaatcactaatcaaagttttcaaactgttcattgcaggattgtaaagatcagattgtgttgataaaagcctatcgacaagcatttccaattgttcttttagttgttgatcttcttcacttaattcttcttccttcttttcatctttagttgattttttagcatttacatcatttttagaagatgatgcatctggcaatgcattaacttctttattttccttttccacaggcgccattcttatactttaaacggtctaaactgtgatggatttgcctttctaaagtgtcaacgaagagctaaagtaaatcgaatctacgagtttcgcattttgccaccctaggttttccctcagcttttttttcagacacagttaattgtcaattattacgtaatctttaatcacacaatagtttggaagtagttgcaatgtagagtaaaaccatatgaatgatgtacattacaactcctgttgtagattagtgttattacataagagtccaaaaatttataaatattctacactgtaagcctattttgaaattagagatagataatcaaggatcttctgccaaaagatcattaataacccaagataactcattcggagttccaatatctttatcacgtaatgccaagtttgtatttgatgattctgatcctgatcctgcagcatttggatcacctatacgctcatttggtttcaaaagatgtgaaatatcggaaagtttatttggaataatgtaactgtttagaccattgaaaccagtgtcagttattactctatcaatttcggcccacatactattattttgtctcttggattccataacctcctcagcaattatatcataatcatcatcatttttaagtttattatcaatcaataaatctaatgtaccatatggttgaatcgtatagggagttaaactaaatgaatcaaaaacatcttccgtcgttatagtgaatttccttctttttgttcgactatctttattttcatcaagtgtgtgttttttggtatcatcattttcaataggttcattagtgttctgtatattgttttctttctcgagtttagtgtcttcgcttttatctctattcagtacaacattttcttctgcattagtggtttctaaggtcacttcattatcattatttacctcagatgaattttcatctttagtatcttcgggttcatttaattttcttgtcgagctagatgttatcgtgattgcaccgtcatcttcatcttcattttcattttcctcttccttatctttttcgttattttcattttcattcttatttttgctgtctttatcctcactatctttatcctcactatctttatcctcattttcattattttcagtagcttcattgtcttcattactaatttcatttttcattaggtaacttcatcaccatgacattcattattttgatcaacatcataatcatcattaccagcatcgtcatcctcgtcttctatgttagtatctctcacatttatcattccagtttctatttctaaattagtggcatcgtcatcatcatctaatgattcttttactttcatattgtctattatatttgaaattattgacttcaaatgatattgaagaccaagatacaatacatcaacagctttcattgaaacaccacccagcaatccacgctctcgtgcaaggcctaacattatatctctcattcttttcctttcaggcaattcataagtttcagagcataaaggttcattaaccatatctaatatatctttaacagctatcattgtcatttctaaagtattagttttattaacaggttgttgttgaatatttgcatcatttgattttggtgaaccatttaaacttgtagttgagtttgaattattattgacttgttgttgatgatggttatttgtaacaattggaacttttggaactaatgcttgtctactcatagccattgaattttgaataacagcttctctttgttggatcttttgttataccttttatacgaattctttcacgaattgataatgataatatatctttcttaagtttttcatattgtgaagatgttgtacctgattttcttttcttggaggcattaccgaaaacacttgatgttacaccatcaaagggttcctctctataacaattggccagtatagataataatagttgattatgcattttacttgtctcctcattttctaatacaaatgaaatatcttccattaattcttctctagataatctaccaacaatgaataatgacaatgcaatttgataagcatcccattttttcccaagtattttttgaaatatcgttacagatttaccaatttcaattcttttagttgtatcatcatcgtcttcatcatcgtcttcatcatcatctcttatttcagataatgcattatcattttcaattttaacagtggttgatatctgattatcgttattattattattagtattattcgtaattgacgcatcgattaagttattttctgttggtggttttagagaaggggataaatccaactcatgctttgagtcctgagtaattggagtagcaagcattatctatgtttaaaatactaccaatactctatgcttacaatacctgaactaataaaagattcacaataattattcagttttagtttcagtttcaattttagttaataacaatcttttacataaacaaaatttcatcaacggaaattcatgttgaatttgaaaaaaagtaaattacgtaatatttgtaaaaaattaaattataggtcacgtgattaatactttttaaaataataaaaaaatataaattacgtaatacttgcatgaaaaaactaaaaatagtaacaattagtggctgaaatcattctttggcacacaccctaatattagttttaagtctgtgaatttttcggatcactatgtaagatttaagaataaaaaaataaataaattcacttgaataatctatttttactcttgtttttatttcatttctattttctttttaacctggttctatctttattctagctatccatactacaaagaaatgtcaggagctgtacaggaattcaatccggatatgtatcatgcattccgtgtattcaatcaaaaattcgtcgttgataaacgttttgaattaataagaggtttgggtcaaggtgcatacggtgttgtttgttcagctaaatgtaccgaaactgaggaaggtgaagataaagttgcaattaaaaaagttacaaatgttttcagaaagaagattttatgtaaacgtgcattacgagagattaaattattagctcattttagaggtcataaaaatatcatattcttatgtgatttagatattatacctgattctaatggtaatttcgatgaaattttcctatatgaggaattaatggaatgtgatttacatcaaattattagatcaaagcaacctttaacagattctcattatcaatcttttatatatcaaattctttgtggtttaaaatatattcattcagctgatgttttacatagagacttaaaacctggtaatttattagttaatgcggattgtgaattaaagatttgtgattttggtttagcaagaggttattcaagcgatcctgataaaaatcaaggatttttaactgaatatgttgcaactagatggtatagagcacctgaaattattttatcttttcaaggttatacaaaggcaattgatatatggtcagttggttgtatattagctgaattattaggtggtcaaactatttttaaaggtaaagattatgttgatcaattaaatgaaattttacgtgttttaggtactccagatgaggaaacaattcaaacaattaaatcttcaagagctcaagcttatatacgttctttaccatttatgccaaaaattccatttagtacattatatccaaatgctgaaccaaatgcaattgatttattaaataaattcttaactttagaaccaaataatcgtattacagttgatgaagctttgaaacatccttatcttgaagtatggcatgatccaatggatgaaccaagttgtccaaaaaaatttgattttaaatttgaagctgttgatgatttaggttcaatgcgtgatatgattctgcatgaagtacgtgcatttagagaatttgtacgtcgtccatataatagcgatgatgaaatattcgattcatctaaatttgtttataatacacaacagcaacaacaacaacaaatgcagcagaaatttcaagcagagcaacaacaacaacagcagcaacaacaacagcaacaacagcagcaacaacagcagcaacaacagcaaatgcaaaaccaatatcaaatacagatgcaacttcaacaacagcaacaacagcaacaacaacaatcacagcaatcacaacaacattcatacatgccatcactaatgacgccaacagggtcattacaatatattgatcaagacatgcccccacatccagaggagatgatcttcaacgactctacaattgaaaatcttgaacaagatttagcttttggtcttgatggttatgcttaccaataattttgctaaaataaactattgaataaaatttgtaagttaaatagattttgaatacatttttttaactaaaattctaaaaaatattataaaaattaatattatttttattattatattaatacacaaacccagtaaataatttcaaccatataaatttataaaaaactcttcatcaatttcattcatattcttttttaatgaattgaaactgtaaatgttatcaaactctccatcaaatgccctctttaaccaaacaaataatctatcatagacaattgtaccagcattatgccaacgaatactatgatcactatcagggaaaacgtacatatcataattttcaactccatttaaatctaatgaatcaataaactgcatactattttggaaatgaacattatcatcaccagttccatgcattaagaggaatcttttaacacctttaaaattctcaaaattatgaacacgacttccattatatccttcaaaattttgttcaggggtatgcatatatctctctgtataaactgaatcatataatttccaatcagtaacaggagcaactgacataccatatttgaaggttttaccttgatcatattcaagagttttcaaggtcatatatcctccatatgaccacccccaaatagctgttctttcaggatcaatataacctttattattaatccaatattttgcagctgcaacttgatctaatacttcatgattacctaaattatcacgaacaatattacggaattttttacctctaaaacctgtacctctaccatcaactgtaacaacaaccgcatttaattctgctgctatgattgacgagaatgaaatagcaaatgatttggaaataagttgagatcctggtccaccataaacgaaaaataaaagtggatattttttacttggatcaaaattcaacggtaaagtttccttataattaacaattaaatcatcatctaatgtgatattaccatagttattttgtggaatatcataagtatccaaagtattttgtaaatcatcatttgaagaaaattcatatgatgagttttcatgtaaatccaataaacgctgatttggaacatcaggtcccatatatgaaagtaataaatatcttgcacctttagagaatgaaatatcataccatgcctctaattcaacatctgtaatattttttttatttgaaccatcaaggtttactgaataaatatgtctttcaattgatgatttttcagttgatacataataaacctcatcagtaacaaaatcatatgctgcagcaccattaacaacttcccaatcacctgaagtgagaataacttttggttcagatgatgctggaggagagaaataagccaaatgatcatatccattaacatcaatcatatcaatataaccatcatattgtcttttttcagtttttggaataaaaatagtattatgagtaatttcaaaccatgatttatcatttcttccatcttcaaatctacttacaattgaattaatttctaaagtatccgaaggacaagaaacgataaagattttcaagatatctgattccctattggtaactctaaccaggacttgttgattaccaacccaaataacttcagttattaacttattataattatcaatatctttatcattatagaagggatcttctgaagataatgattttaaaacctcattttcagtatcgtagatgacaatatcaacaattgggttcgagaatcctgcctttggatatttaatttcttcaacaattggataagatgatctattatttgcatcttcttgaacaaaatatggaattgggaaagttggtacctcagtatcatttgaacgtaagattaataagtgattagaatctggcgaccaccataatgctgaatcaccttcaaaaacttcttcttcataaacccaatcaggtttaccattaaaaatttcagaactaccatcagatgtaatttgtttagtaattgcgttattaaaatcagagatatcattgatatagacattattgcctaaaatatatgaaattttttgagaatctggagatataatagctaatgcaatttttgaattatcatcaatattattagatataagaggttgaatttccttagtttcaacattatagatgaagtaagaagcaaaatatgaatgtctccaattatgaactttattacatgtaagtaaagcaattttcaaatcattactaaaagtaattgattcaaccaagtaagatttactttcataattaattgaatcacctaaatcatataaaatagtggaacttgtatcattttgtaaactttttaaataataattactatcatcatcaactactatataatcaccagaatcatcagttaaagaatttggagtttgaatccactgaatatctttgatatttggataaaaagtaccatttctaacagcttgaaaagttaacggtattttatcatttccattagatggttctaaaaatagattttcatgacaatcagtaattaaatcatcattggattgatatttatcaatattttgtaaacggacttgtttatgattgatatagagactattgacttgagataataataaagttgtaccatatattatcgttattgttatcagggaaacatatttccaagatgtagtagattttataggaatgggatgctccttatgataagattcaaacgaactcattgtttagctgtgtttgattaatagcaaataaaactttgttaataaaaggaagtgtaactagataaaatacagcagaaatagagcagatatattgaagaaaaagaaagaaaagtgaaagaaaaaagtttagataaagataaagtaattaattatcgattgcaaaatgggctttgtgcgtaaaatttcctataagttgacactaaattttttttaatttattggggtggcaggttattataattattataaagtgattacgtcatatgtatactatagatacactttatatatatatatatcatctatggcttctcaatagagacagtgtttgcattatcctttgcactctttaacattgcatcaacgattgcaagatgatggaatgcaacttctggccaacatataatactacccttttcaccagataactcttcaccaagtttttcaaattctgttgctgtaccccaattttcattttcaattttgatttcaacttcatttttttcatcatcacttgttaaaccacctgtacgtaaaataaatctatcaccagtatttggtgaaaaatcgtagtaaatactaccattatcacctaaaatttcaaaataaccatttttctttttattaccaaatgcactaccataattaaatgaaccaacaatacctgaattcattttacataaagcccaaacaacgtcaacatcaccactttgtggtctaacttgaacggtacgtgcatttaatgattcaacatcacctaaaactgatgttaataaagctaattgatgaactccaccatcactcaaaaatcctccaatatgttgaggattttgacgccaagttgttgttaaatattgattattaaaattaaatgaaccagttgaatgataattaaatccaacaactttaccaatttttttaattgcatcctttaattctttaacggctttaagataaacccaatgttcatttactgcaattaaaacttgtggattttccttacttaatttaacaatttcacgtgcttgatctaaattagctgcaattggtttctcaattacaatattttttgaatatttaattgccttttcaataatttcaacattatattgaacaggtaataaagcatcaattaaatcaacatttggatctttaaatgcatcatcaatatcagaataaacttttaaaggtggatcagcttttttggcaaattcttctgcctttgaagctgtacgattataacatgagattggtgtaaaatattttgaatttgttaatgatggtaaatgtgattttgtagcaaaaatacctgtaccgataattgcaactttagtagtttgttgttcagacataattgattgttttaattaattgattgtttaatatattatatatgaaatcaattacctatccatcataataattatactgtactcattgctgatatttatactaatttacatacctcccagccatgttcaaatgccaataagcatcggagataaattcggcttgagcttccccgcttagtgaaaagaccgagaaaagacgcgactgagaggtatccccactataaagattaacagtatgaatatatcaggagataatatcaagaggtaatactaagagataatatcaggagataactgtgttcatttcatgaaattgaggggaattaagtgtggaatcgatgagattgtagagtcccttatcttctcatatcacatttagttgtatattaggaagatataataatattatctcaatggattagttatatattcaatacacagtatacaaataaaaatgaacataaaaaaatagtacatagtcaactgaagaaatacaactaactaattaagctcttacctgtttaacaggaatactgagctattgattaaattatataattttgaatttaaagatttaaaccattttattattatcccaatggatgattctaatctactctaccatactctattgtatactttaaaatcagtattaccgttgaatagtgttctaacttaattagatagttatgtttctcccgttggataaagaagaagtttatactaaggtattaattaatacaaaattaataatcgatgagcattctaattaataaataaaaatgagccgtcttcatccttggcgtcgatgggactgccacgccgtatttttcttaccacagaaatttgaatttttttttcgagaaagtagcactgtacgctattagtatttaatgtgaacatgaatttcagttgaatttcactggtgattggattcattgaatttattaaatttaatcaataaaccaaactaaccatgaactctattaaagcagctaatcaagttttacagagaacaagtgaataccttaattctggtcttgtatcatctcaacctgcatggtataaagcattagcttatcatccaccaaaacatgcctttaataaaactgttcgtcaagatatacttgaaaatgttaaaaatgaagaaatttctgctatttctgaaattaatgataaattatcaaatggttattatattactagaattaaatcattaccaaaggaaaaagttacaaaacttttacgttcacaaaaattacattatattgaagatgatttacgtttattattttataaacaacatccttgggaattagctgatgctaaaaatatggttgaaaatgaatataatttagcaaatgttaattgtgattggagtcatttaagacaatttaataaaaaattagatggtgaaagtgtagttcaaagaactttatatttaatggataatgaaaataaacctttattacaagcttatgaagaatctaaatttgaatattatagattaaaaatacaggatgaaactgaaatgaatataagtagagaagaaagtgaaatgtttggtgcaatttatccttcaacttatattgaagatggttttcgcaaaggaatctgaagtattagaaaaatggagttctgatgcgaattaaacaaaatgaaattttaagtgctaaatcaaataataataattcaagttcaacagcttcatcaaatactgctcaacctcaaactcaaactagagctacaagatcagaagatcaaattttcgatagtttaacttaatcttgaaattgtcttcttttctgtttatataaacattatcgatcaataataataatgataatatatatatataacttgtctatagaataaacaaataataaataaatatacgatacactctatttacatgaagctaaatgaacttaaatccatttcttttcttctaattttctcttctctaatctcttcttatatttactacctctatatttgattaatacattatctgcatcagccaatgcatccgcaataaccttctttctagcttcatatgttctttcccatttatgtccctttggatataagacaccctttaatattggtgatgatgcttgtttatcttcatagaatttcttatcatttcgcaagttttggcattaaatctgcaattccaaatttataggctaatttatataaatcactttgacgacgtaaactatataatggttcatgtatacgtccagttattggatgtttattaggtaagaatggatttgcatcgtctgcatttgttaatgttggttgatctgcatattttctgattggtgcaggtgggaatttagtgaaaaagttttgtaattttattgggagctttgcaaatgcttcagcagagttcacgttgaataatttagttgcactcattgcttaatggacaaactcttgaactctttctaagtatcaggaactaacctttaaatttcaattttcatgtctactaagaaattatttcgaggaacaagaaaaaaaattattccaaattttaatggtgcactgaagtagtgtgttttgtatgggatatggtatatctgtaagttatagaagatacttattacacaatgtaccagtaattatttgttaaacatcataatgatacactcgttatgctatctgtaaaaaaatctatttgaaaaactgacccaatcaacccttagcaccctatcaataactttgactcataatagcgcgcttaattatgacaaaattacctatttaagtaactgctcatggcggttggaagattttgacattgaatttatttccagtttttttccaatttctccttgggaagtaatatatcacttcttttctactttttaagtattttattgaaacaaacaaaaaacaatgttaaagtttacaaaattatcaagcaaagtttctacatcattttcaaagagatttgtatcatcaaccacttccgaattattaaaggaaaatgttccatttgaagttacaacttattcaagacctgatatgattctttcaaaggctaaaggttcatatatttacgatttaaatgataaaaaatatattgattttacatcaggtattgccgttgtctcattaggtcattcagatcctgaaatttctaaaatcttatttgaacaatcatcaactttaatgcatagttctaatttataccataatccatggactttagaattaagtaaacaattagttgaaaaaaccaaacaatttaatggtatgagtaacgcttcacgtgttttcctttgtaattctggtactgaagcaaacgaagctgcgctaaaatttgctagaaaacatggtaaatcaatctctgaatcaaaaactgaatttattacttttaaaacttcattccatggtagaacaatgggtgcattaagtgtaacaccaaatccaaaatatcaagctccattttcacctttaataccaggggttcatgttgcaactccaaatgatattgaatctgttaaatcattaattaataaaaatacttgtggtgttataattgaaccagttcaaggtgaaggtggtgttcatccaatggatgttgaatttttagttgaattaaaaaaattatgtaaagaaaataatgctgttttaatttatgatgaaattcaatgtggtatgggtagaacaggtactttatgggcacattctaaattaccaaaggaagcacatccagatattttaacaatggcaaaagctttaggtaatggtttcccaattggtgctactatgattacagaagatgttgaaagtgtattaaaagttggtgatcatggtacaacttttggtggtaacccattaggttcaagaattggttgtcatgtcttagaaagaattgcaaatgaggagtttttagcaactgtaaacaaaaagagtgaattattaaaggaaaaacttgcacaattaaaggaaaagtatcctaatgaaatagtagaagttagaggtcaaggtttgattataggtgttgaatgtaaggaaaatccatctaaaattgttgaaaccgcaagagatttaggtttattgattattacagctggtggtaatgttatcagatttgttccacctcttaacattgaagatgatgttttagttgatggtgtcaagattttagaacaagcattcgatttaacttttgcaaaataaataaataattagatgctatatagagataagaaatatttagaattttttttgacttttatttacattttatatttttataaactatccttaacatgtacaatacaaatttgttagcgtttagtccatgtttggttattaaacatgtcaaacatatctgatctcgaaatactagaactatcaatttcaagtgcaatgtaaaatccactgattcaataccagatataagaaaatcaaaattgaacctttgaaataattactcttaccttcagtataaatgtaagtgaacatataaacaccaaacaatgttgcaataaaatcccaatgtgggaaaataagtgggaatattttatcaataccaatatttaaaacatctttcaccttttgtgtatccaataaactaacaatacctaaaactggattatcaactggtgtagcatctaaatatgaaattgtatttgactttgatggtaatccctaataaagatgaaagtcttggtaatccaacccaatcattcctaactaacagttgtaatccattcgattcacttgaatatttaggtaaaattccagacagaatacaacataacaattggaatttgtaaaagacaaacttgtaatgcataagcactaccaatttccatacttaatgcaacattaccatgcattgcaaatgaaaatgcattgacaaattctgtagtgtttggaacaagtgcaaaaatagttaaacccaaaaacttcggattaattgcaatggatttaaggacatcatcaacacaatcaactaaaatttcagcgaattattgcatataataaagttgcacctaataaaattgtagtagattttgttcttgaccagttaggtgcatcatgtccaccttcagctggtgcctcaaccggttgttcttgtatttgcaatggctgtgtggtttgtgcaacttgatttgaggttttcaatatatctgcagctgatggtttggtattatttattgaaagtctagatggtctctgtgacgctacattattgtttgtatttgaaacattaggcgattgttcattaagattgaatgaatttatactatgattttcactaattggattggtttctgttttcttttctttagatgaagtattaacggtgttggaccaaatcagcgctgcatgagttttcaatgtaaataacaaacaaatgcaataaactaaaaataaactggaagcacaaataatagtaaatggtcttaaatagttaatgtataatggatcaataacaacagatgattgatagtaatggcattttctacaatcatctccaaatttaatttcacaaggtgaacatttgactttatattcaccataaatttggtataaaatagttggtgaaagcataacaataatagcatataataacattgttgatgaaactcctgcacttgctggattatatctttgagtttttcttcttatagcaccaaaacacatagaaccaccaggtaataataacacaccacctaaaatagagccaataagtgaaccttcaactaattttgcttttgattgatctaatgcaatacaataaagatatatttcaacaattgttgaaaagaatgcattgatgacagcacctaatcccattgaagtttgagctgaaattgaagcaaccgcttgtccaataaaatatgccaatggaataatagatactaaacataatccaaagataacatttgaatcagcaataagtgatttccaaccaagatattcttttaaaagatagaaatctaaaattgtaaatagaactaggaaatttagattaatgaaaaaaatatttgtaccagtcaactgtgtatttatagtaatggaatccaaatgatctataagtaagaataagaaatgattcattctttttattatttggattagcagcatattgacgttcataagtttcttcattttcaaaagataatgcaagtggatgccttctgatatgactggccataatagttaaaaccttactcattggaatacaaaagattgaaagccaagtgataatacttataatcattccaattggaactaaaataaaataatattgaacataaaatgcaactctaccaatagtccaagtacctctaccaaaaaatcttttcttgtaaaatgtaacatttagctcctcatcatcactatcatgtctaggctgactatgtggatcattatcattattaagaacattatcaacattattttgatcagcagcatttccaatcataggggaaggaactgataatatattttcattagtagttgattcattattactgttcatattgtatgcagcagagaaaaataatttaccttgattttgatccctccatctagcaaattcatccattgaactaccaacattagcatcctcatcaagataattctgatctgtcttcaataaaacaattttcccaaaaggatataataaatatgaagctaaattccaataaaatttggcgtatttgattgaatcatttttcttgggatcagtgaaaatggaaaagaaatatgtaatgaatcctaaacaataacaaacaagaaataagagtaaaccaaatgtacaagtccaaataatgttgaaaatagtaactgaataatgtattgcaatgttcgaaccaggagtttgatgaacatcacgttctgcttccttttgaacacttctatcttttttataaattgcaggtttccaaattctaataccgaacggatgtgtttcattaatagcaacttgtctttctttcaatgtgaaagattcattagataaaataggatgcattatcattataatctacatctgcactttcttcttgatccattgactgatcttggtacaaattatcctgtgaatcatctaacatactatccatcgctgattgttcataactattattatgcggatgcatatttggatcgacttcaattttctttaaatcatccaattgttttgtagcttgttgtaaattattaaatacatccgattcaagttctctttttctctccgttaaaggatctaccttatcattaagttgattatggccaatagcagatggattaattgatttcattctatgtcttaaagcatcattataaccttctaaatactctcttgttaaatcttcttcaatttcatcttcgttatcatcaacggagaaaacatattttactgaaggttgtttacgcagataaggtttaggtttactagaagcaataacatttgtttgcggttgttgacttaatgaagtagcagatgattgtggttgtaattgaggagattctggattcattgaaggtgaattattattaataatattattattagctttttctcttagcagtacgtattgtctatgatgattagtatttgaagtactatgttgtcttgaaataacgtgatttttaggcaatggagacctaattgatcttgttgagtgtttcttctcaattgatggtttttttgtattaataggaagtgttggattgttatcagttgaggtattgtttatcgtactattggagtcaattgaagttgacgaaccaactaaatctgaatgcttactatttgaactttccgtaccggagttcaaattattttgaggcattgcagttaacgtataattgttatactatctatacactggtaagtatgctttagtaaaagtaaaagagaaagatagaaagaattatgcaagatttctaaggagtaaatctttaagttgagagagtaagtaatcaggagaaaacgcacgttttttttggggttttattgtttcgtaaaagtttcaggaaccgtatataagtttatttatagatttaaggtcaattcaatttaactcagttcatcaacgatacaggtttactataaaatataaaacgtatgtagcatatatagtatttttaaacagtatcacacatcgtaatatttagaaaaagaatgggaacattgcttttctgttctttgggtacttatcaccaaaagttttcttatatttagcatgtttttgtttagcccacatcatcattgtaccggtaccaacaacaaagaaaaggtaacctgaccaattattaaccattaatgcaaatacagcccaagaaagtgattcaaagaaataatttgggaatgaaacaaatttaaatgcaaaaccataaggaattttatgttctcttgaaccatcagatcttaatcttcttaataagatatgagaatataaattacaaatttcaaaaataatcattgcaccaatataccattttaattcatctaatgaacgattttcaacatgatgaataaatgaccaaaatttagtacttgtattattagtatatttatattgaggtgcataaattgagaatgcaataaataaaccattgaaaatccaataatgacctgaatttctgaaaaggtaagctaagtggcattgtatcagctgagaatgaatgaataaataaagtttcatattctctctttaaataatgtaataaagtaatattaaaagcagccaattgagtaaaattcatttgtcttgggctataatataaataatagaaaagtgaatgaatgatcattggacctaaatattcaataaaataaacaagtctccaaccgatttgaggaccaacatctttagcatagacattaatagttggattttttgaaaaatcaagtccattttcttctaaggtcagataattctttaaagtaactttcttaccctttgatttagaatctggtttatcattgaagacataggagaatttaattctgtttggatcagagacattatttttctttgcataggcatcaatgattgcagaaagggtggtactcggagtagtatcacaattgatcttcttgagtttagaagatgttggattgatgataacgttaaccattgttgctttaattcaatgaaaggaataaataaatgtaggtatataatttccagtgaattgaagttccacctgttgtttgaaaatgtcaaaaatataaatttgattttcttaactaagcgcagattttaaattgaaactcttttaactataacctttctctttcttatataaagtaaagactttttaacccattacacagcaatgaaattagtgaactttcttatgaaactacagaatgaggtagtacaggttgaattaaagaatggtacaaccgttaaaggtactatattatcagtatcaccagctatgaatataaacatgaaggacgcgacgatggtcatcccaaatagagatactacaaagcttgatcatataacaattagaggtagtcaagtacgtttagtattattacctgatgaacttgattgtgatgctattttacaggatgcagcatttagatctaaggcaaaacctgttaaaacaacagaaacaacaaaggcaccaaaacgtgttgcaagatcacaaaatagaggattttaaatttaaaacattactaactaatattactatcaatacactgtatactatcataatattttcatcttttctataaccattgtaattttaaaaatttctataaatcaataaatagatcattcatccattgcatctaattcatcctcaaattcatccattaattcactttctcgttcctctaatttcccactctcttctaatacccatctattgattaatcttggtaatgtcattccacaaaaatcattttcttgtgtattaagtaacatatcagcaatttcatcaatataagttaatttaacaacaccattattaataattctaattcttctataatctgaatatttactctctaaaaccttataaagttgaacattatcctcccatacaagtcttgcataaaccataaataaaacagttaaatatttatatccatgattaccaataattaaccattcaactacatcaaatggtattattttatcttgttgtaacaatcgaaataataaagtaatgaatttacatacttttgtcttagcaacattgagatacgtccccactatatgtacatttaatctacattcatccaataatccataaaatcctaaccccattcctttcatataccaataatgacctatcttgaattttctctctcaatatctttcctaccaataaagctggattaactccatgaattctcaacccgcctttagcaagccccctatctactattatccttatttctctcctgttccttatccatcgtactactacctatcttgactaacattaacctaccaactatatataccaggaagataatacacctctagattcatgttacagacgatgggacgatgtataatccttacttaatagttaaaaaaagagaaaaaaaaatattttcttcaacgacgagaaaagctgaaatttccccgtttgatggcacaagttaataccactctgttgacctgcaactgaatctctgttttatccttttcgatttgtgtcgtttccatctgtaaactcatcaaacagtatgtattaataatattcatataatagagtatccactttgctctttttacaactttttttttacatcaaatcaaaaggaatcagatttactaacatagcttaatccttacttacaatttaacgttaaattatttttaattttgatagatgtcaactgaagaattaacaaacgcaactcaaaatttagcattagatgaaaagaaagatgttacagcattagaaaatcaagaagaatttaatgttaaacatccacttaattctaaatggactttatggtatacaaaaccacctgttgatagtaatgaaagttgggcagatttattaaaacctgttgttagctttaatacaggttgaagaattttggggaattttccatgcaattccaaaagttaatgaattaccagttaaatcagattatcatttatttagagatgatattaaacctgaatgggaagatgaaaaaaatgcaaatggtggtaaatggttttgtcaatttaaaaataagaaagaagatttaaatgaattatggacaagaactttattaagtgttattggtgaaactattgaacaagatgatactgaagttaatggtgttgttttcaatgttagaaaaggtaatgttaaaattggtttatggacaaaatcttgtgatgaaactaaattaagagcaattggtgaaacttttaaaagagttttaaaattatctgatgaaggtaaaatagaattcatatgtcataaagattcagattcaagaagtgcaaaaccgttaatggttttataatcatattaattaattaatcaattaattaattaattaattaattaactgattgattataatcttgacataacaatttgaattctatttataataatttttgcttgaattaattttttttaaataatttagtatgctattatgatttatatacaacttatatataatataaactaccaaaaaaagtaaagaaatattttttataaatagaactgaactaaaaatgaaatttgtgaaaaaacccccctaattgaaaagctataaaaataaataaaatgcaaattgtaatttaataatgatgaagaggaaaatacaactaataataaacatatggcacaactctataagttttagttgtaccaatttcaccatgaattgaaccaagaccaattgtacctgaactccaagtttcaatagtatcatacattttagtaaattgttgaacataagcacttgaaatggcaactggtaaaccattttgtgtaatagtaatccaaacataggtatttaaatcaactgttgttaatttacctaaatcttcaactgttacatgagttggttcaattgttgttgttggtgttttaatcggtacataatgaggacctgctgccattgcagttgtatcagttttagttttagcaattggtaattgttgttggggtattagttgtcattgcattaccagtagttgtagctaatggatcaagtgaatgagatattgatattaaagataacaataatattgataaatgggctgagaatttcattgctatgcaagtgaaggaataataacgagagtaaatgagtaagtgagtaagtgaatgaaatgtattaagttattagataatagaggtctatatatatagatagagagatggttacagtataggaatgaaaagaagatattcaacaaccaatataaattacaggtgattaacttgctctgtaaattgcatgtactgttaattaagatttcggagttgctattaatttttcacactttaaattttctgctggggggctttaacaatcgcaattttcaattttcaaatttcaatttcaattttcaaattttcatttgttagaatttaaatttttctttctcactgtgcgatggttaaagattaattttttttttcattttatttttcaataggattatagtccttggctggatttgacattattaaaataagcttagtatcgtatcatactattataatatcataatatcataatatcatactcagaatcatgactgatacctttatatcctctcatatattcaatgaaccagatgattatacccctgaacctccaaaaggtactcttgcaacttattcaactttaattactaacactgatttacaaattaatttaattggttcttcacctctttatggtcatattttaactcatgcttgtctatatttagctaaatatatagagaaaaatgcagaaagtttaattgtaggtaaaactgtacttgaagttggttctggtggtgccttaccttcaattttatgtggtcatattggtgctaaatatgttatttcaactgattatcctgatcctgaattaattgaaaatatagatagaaatataaaggaaaataatgtagaaaataattgttctgctcttggttatatttgggggaatccaacaaatgaaattattgacactttaaaagagaaaacttcaaatacttcaaatacttttgatattataatactaagtgatgtcatatttaatcatagtgaacatttaaaacttttgaaaacttgtaaagaattacttactccaaatactggtaaagttctagtaactttctctccacatagaccaaaattatttgataaagatatggaatttttcgaaactgcttcaaaagacccatttaattttacacctcattttcaaaatttagaacattggtcaccattatttaaagatgatactgatgaatccaccgtagaaataagaagccgagtttatttttacactctagaataattcatatatatataagtcctatattataatcaaattctgtatattattcatttttcatattaactaatcacaatatggttatcttcttgtccccaaaattattaagcattgtcacatttaatacgtcattgcaaattacaattgggtagttattctactattaataccgattatatacaatagtaatttagagatctcgtcatatatgtagggagttgactcaaataccagccacccaggttaacatgaaacaatttttgtatcattttctcaccattacctatttaggaaacttttgcactcagccccttgctcttttaggaaaatagaaagtatttagcaatcaggtacacgcttttttagttagtattttacacgaattctctattttcccacaataagaggtatccaatttatagtgtccactaggaaacatagtacacattgcactatgtttcatagcaatccaagataattaaaataatagagtttcatctagttaactaattaacttgtttttctattattaggttttagttaagattgtatttaagtagttgggtttcctaacttttttttttacatctcttctaattcaaccttacacatattttcgtttatttcaacttcgactattttaaccttttctcttaaattttaacttctctagtttctcacaattcacaaccgtgtttaccccttaacaaactaaccgactttcgtttactttttaacaacacttttcaaattatttgataataagatctattcaaatataataaaattcttattgatacctatattgaaaatataaacacaattctttcctgaattattacactcatttaaattaaaactaataacaatcaattccaactaattacattcttttaaaagatattattgccaaacataatatctatattacttatattgattgcttacattcatttacaactttattaaaaaaaaactaattataccaaataaacttattaaaaatttctcattataaaaaaatgttagctattttaattattacatcaattctttcaactattgtttctgctttatcagaacataacaatgttgctctttattggggtcaaaattcagctggaactcaagaaaatttagcgtcttattgtcaatccgaatctgctgatatttatattttatcatttatggacatttttggttattcttattccccacaaattaatttcgcaaatgcttgtgaaactgcatttgaaggcagctctttactccactgttcaaacatagcagctgatattaaaacatgtcaatcattgggtaaaaaagtcttattatctttaggtggtgcatctggtgcttacggttttagcgatgacgcaagtgcagaaacttttgcaactactttatggaatacttttggtgctggttcagactcttcagtcaaaagaccttttgatgattcaattgtcgatggttttgattttgatattgaaaataatattcaaactggttatgcagctttagcttcaaaattaagaagttattttgatggtgataattcaaaacaatattatctttctgctgctccacaatgtccattccctgatgcatctgtcggtgatttattagcaaatgctgatttagattttgcatttattcaattttataataattattgctcaacaattggtaataacttcaattggaaaatttgggcatgactttgctaagaatgattccccaaataaaaatattcaaattttccttggtttacctgctgctccaggtgctgctggttctggttattcaacgattgataatgttaaatccattttcgaaaatgatgtttataatgttgatgattcaaactttggtggtttcgtattatgggatgcttcttggtcaaaaactaatagagttgatggtaaatcatatggtgataacttacaagaaattttagattctgcttataattctgaagaaattactacagaaaaaactacatctacaacttctaccacatcatctacaacctcaactacatctactactcatactacatcatcaatctacatctactactcctactacatcatcaacttcaactacatcaactacatctactacgccaaccacatcaacaacatctactagcccaaccacatccacaacctcaaccactccagcaccagcaccaacgccagcaactacaacttctacaacttctacaaaccctacaacatcaactgaaatttctgttgaaatgccaacgcaaaatgttgataccccaactgcacataccactcttgaaacgaaaacaacttcactaataatgtcatcagaaagcaacgtcaacaaagaaccaaatccaactaccaccagtaatggctcaagcaataccgattcaacagattgttcatctttatcaggtcttgcaaaagctcaatgtatgaacaacaatttcaaacaaggtaaattcttaggttcaagttcatcatgtactgaaaatgaaattgcttgtgatggtaacggtgcttttgcaatttgtaattttggaaattgggtttcaatgcaatgtgcagctggaactacttgttatgcatacaatgtcggtgatgatgtcgaagttggttgcgactacattgatagcaagtctaagttcgaaaaaagagacaatgaaagttttttcagtttacttaaaagacacgtacatcatatgcattaatctagctcaatctacttctaatatttcaaaatgaatgttttgattccttactatttaatgccatttacatctattctatatcgttctaatttatacttttgcattttattttacatcttatcctatatataatgtttttatattatatcgtttaacaacttaatttcaaaaaatcatcattatctaaatcttagaaactttgttcgttgaagatgctttctctatcttattcaaattatttttaattttgtttaccttttcttttctagatctcatactttttacacctttactacgtttatttttcagaatataccgtaaaatatcacggacatcttcatcattttcatcctgatcatcatcttcatcattctcatcatcgtaatcattttcattattattattcttattattattatcataacctgtagtatagtcatcatcattattatcatcgccatcttccccaatttcattttcatcccatctgtagtcattcttaattggcgagcttttacttatcttatcatcagagaatcttactttggatggtttcagtattccgcttcctttagcttgatctttcaataatctaatcaatgatttcttttcaagatccaactctcttttttttgtttccaattctctataaagtgattcaaacttctcttgacttttctgattttctagtttcatgtcttcaaatttagattcaaatttaatattattagtctcttgcttcctccgtaagttaaccaactcatttttaatgcttcctaactcctccaataatttgctattagaggtcaagttaacttcatctaaaactgtttgtattctattatccaaattttctatttgtttatcaattgttttagattgtcctatataatcgagagaatcatcagttgtgtttatttttgttttgttatctttcttttccaaaattgttttattcaattcatttaagtatcgtttactctcttcaagttgtagatctaactctttctttttcaattctttttgtaaaatatcatcattatatgttcgaatgttgctaggtattataggtgaggatctacttttatatgttgcgtttgattcaccatcattttcattatataatattgatctaaatatttttgatccaaaattactcaatgaattcaataagctgttgttttgctcatgctgatatttactaaaagtcgtaggtgctttagtggatgaataagacccaaaagagtccaatggatttcttcttaatgactctttagttatattttttattgtgtcatcatcatataatgctgcacgagttggtatgtggcctattctatcaattggtttttcgcctaacaattcataagttttcaaactagcaggatctctattagaaaacatatttgatgatttaagatactcagattgacgatttggcagttcagttgatttaaaactatatcttgaacttgttgatctcaaatcatttttacctttatttgaagtttccctttttagaaattccaatgcttcgtttttccttctttccctttccacctggcttaatgataatctatctgatgataaattattgcttttaaaacgaacacgactggaagatgttccaagtttcttggtgattgatgatggtctcgtggaagacaattttctgattctatctttacctaaatcatatgatgtagtggtagacctacgatttgaaggtggttcatcaccaaaatcaataggtatacgcatttttggaatataagacatttcaatcagttatattccttgtatgataataaaatctgaagataatgtatacactattggattactaaaggaatagatttcattttaataaatgggtttgttgatgttttcaaatcttaaagctttcacacgcgtcctataaaattttagagtcaacgcgaatacatgttaacattaccagtcaaattttcagttctttaagatggttgcagtgttttaagaagttatttattcaagtgataatattgcttaaaaagatatatcattcatatattgataccatggatagctcttttattgatacaaccggtattgatgaaccaattttaccaatagaattaaaagcaactgttttcagaccattttgcttatcgtgttctgtcaaagaaatacggactaaatgttcaaacatcagctcttgaacatctgtcctcatatgtagggagacgtttcgggaccaaatggaaaagagatcctaaaactttagcatttttagatgctttaggaaaattatggaaggaacaagaacgtggaatttttgttgatggtaatggtgttgatcaagttattaaagagataagtttcaaatgaaaagggaatgaaacagagaataatcaatgcacaaaagataagagaagcacaaaaaaataatatgcagccatctcagttcaataacaatgatattctaacatcagatataggtgatgttgatgaaataaatgctaatagtaccattggtcaattaccagatatttcaatggatggaaatactactacatttgatacatcgatattgtttgatacacacgcaatgaatggtatagatattgatacatctgatcttattgattggaagtcatattttaaagttcttgatccaaatcattatacatgtttccaatatgatatagaccgtaaacaattcaactacgctcaaccagagaaaaacccaaagacaataaagctaccaaaagctgatgccaatgccaaattttaccgttcaagaatagaactgttacgagatagaatttatagaaacggtatattttccagactcaaatataactctacatcggaatcaaaagtccagaatcaaatgcatcaacctaaacacattactgctgttaaaaatttgcttggtagaaatgaacaaagattcattctatttggtttggttacacttaactcatttggtgtttggcaattacaagacgattcagataaaattgagctggttttaaaacaatgtatttttgcaaaagatacattttttgtttctggtaattacttacttgttgatggattttattcttcagctggtaagtttcacgttttatcaatggaacaccctcctgctgaagatcgtgaaagtacaatagatgcatttggcgatatcaatttgaactgggattattccaaaaatggaaaaactgatccttcaatgaaaagactaacacataatgaacttaaaaaacatacagatcataaaattgtggttttgggaggtaatttgtttttagatgatatagatattttgaacaaattgaaaaaagtactgcaagaaattgaaacagaattgaagttcaacctagaatctaggactgagaaggccgataatgtacatgataaatcaatcgcaattgttttcaatggtccttttgtatctaacgcattaactgttactgaaggaacttcatcaagattagttacgtcatcgggatcatataaagctggttttgataatcttgcaaatatgctacaaaattataaaattatttgtgataactgtaaattgatatttgtaccaggagatgaggatccttggttgtcaatgattactaaaaatgctaattcaatttggcctaaaatgaaaataccatcaatttttggattaagattaacccgtctagtaaaggatatcgattgggcatcgaatccatgtcgtttgagttatttacttcaagatatcgttttgatgagagatgatattggtgaatccttcagaagacatgattttacatacttgtgtgaattgagtgatgaagaaattgagaatgcacacagacgtataaaagataataacgctgacggtaaagatgcgacaatggctttcggtaatgaaccaatgagtagtcaactttcatttttaaacgggggagatttagaaatcgataaattaactataaaagaagtcacagatagtgaaaagtttaataaaatagttaaaactttactcaatcaaggtttcttatcaccatttcatacaaatattagaaccattctaccaaattattggctgcagatgaatttgatgccgcttccctaattgtattttaatgtcggatactacatctcctacattatcaacaatgtacaaaggttgtctagttgctaacgttggaagttttgcaaataagggtcatgtgagttatttagagtattatccaagcagtcaaactgcaaatactaaaacagtatactgaatttaaaaaaaatcgtaggaattaataattcggtttaatcactaaattctatgtaaatcaatatggatattgtttaatagtatcagtaacagaaacgggtaagcaataaattggatttataggggtcaaatcaccataacccaataaactcaaacctgcgattccaaaaaaagtatgatagacatcaacttccttatctggacgatcacttataccacctttactatcatcttgacacgagaggatgaatccttgtaattttgcaccgtctatataatgcaattttcctagcattgataatgatgataaaacccaccaactataacagacatcaggcaacttttccggtcttccattcaatccaccgccttcgatttgtctatctgataaccaccactccaacagttcacgatttggtagtttatcaaggttatttgtgattgctaaaacgcctaaacatgtgaatgcttgtgcggcatgagattcagcacctggaaccattccaaagcaaccgtcaaaattttgacactgaagaatccattctacagctggattcacaatttctggtgttaatgcttctaaaagtgataaacattgaattgcattatacacaaaccttgtatcaacttcaccaaatcgatcaccttggaaggaaccattttctaattgcatacttttgacaaagtttatcacacgatccttttgttcatctgttaattcatcaattgcatcatacattttaagtacctgtatagctgatagtgtagataacatatgtgcatcatgttttggagctgcaccaaatccaccatttgattcgtcaatacatgaaatgacaaattgaataacttcagatctttcaaattccttttgatgtttcaagagaaacaaggtaccaagaccccaatataacgcattcatctttaaatgatctgccatgaaatgtatcaaataggctggatgcctaaacaaatctttcacatacatgacatgtttttcagctaatagggattcattcatatttcttacaatttcaaggacttattgttatacaatgtgtatattatatatatatatatatatatatatatgtaaataactagtactagtatatcgatgtataacttggttaaaccaacccagtgtccttcagttagaaacttttgttactcgaaataaaaaatatactttcatgttcgtcttcttcaatttcctttttatctttttaaaatagattataagagtatggacgtcggtactaaaacggtaaccaagataactttatatgcggagcccagtgaagtgtctaaacttttctttgaagtgaagaatggatattatgatcctgttatcttaaaatcggaagaacaatttctaacatggtggagttggatgcaaacaagaacagatagttgtggtttatatgatggattcatggaacttacaaaggcgattaatcaaaatccacctcaaaaaatgataggcatggatgatgaagaaatggtgattaagacattaattatagattctgtaccagaagttttgtatcttaattcggagagtgattctgcccaagagtacatacacagctgtctcaaaataggaaacatgaaaccaggagtacaaacattaaaaaacttgatattggaattcaatctggataagaataagtctaagatagaaatcatgcatgagtggaactcattgaaactcaaacatcaatttcaaaacgttacaattaatgaaactgatattcttaaccgtttcattgattatgttgcatcatggaaatcagaaatcgagttaaagaatcagttgactgagattcacaaatgtgattcttctaaggtttggaaagccatatgtgtattttatgaatggaagataaggatggcaaaatacgagcctgattttgaacactcttccactactgttattaattcaaacgatgttattaatttagataagaaatgctacttatgcaaatcatcaggtcatcttaaaattaactgtccaatgaaagattgttgttttatgtgtggtgatccaaatcatttcattattgcatgcccagttaatcgaaaaagattgctaaataaatatgccattaaaaacagaacacattgcagcccacatgatatgtacatggatagattgaattatggctgttataacaataacaataatacatattatagaggtaattttaggggtagagacaacagaggaggttttaacaataattttagaggtatatttcatggaaatgttagaaaaaacggttgttttaatagaggcagaagttacgccaattttggtagaagaggtggttacaatagaagtttatcaaaaaataggggtggcaggctcaactagctacacatggcaaatttgctacaatagaagacatatgagaaactattattgtcgaaatgcgtgttttaagtttaaaaaatactatcaaactcagagaatcagataatatcaatatcataataagattttttagatggtttcaaagtttaccatgactggtcgaatcgaatcactattgaagatcgaagagcttttgttaatattgatagtgttatgggaactctcagaaaacattttacttttctttttctttgttttattcttacaactgatatacccagggttaatgaaattttctataaacatgataaataagtttactggtttaacttgttgtgtgtatttttatatataatttactgcaaacttattatatccagtttgtgtattaactaatcgaggttaaccttattcgctgtcaaataaaaactaagttcaagacccattttacgaaaaaacttttggtttttttcttgggagtagtttcatttatcttcaaacagacctatactcaagatatactttatatccatctaaaagaaatgccagccaatcaagaaggcactagtctttcaccagacacacaggtaaatgaagttgtcgaaagtaaagaagttaggcatgctattgaaaacaaattcaagtttactgacaataaagaagatttagatatatcagaaaacgaatcaaaggtgatcgatattaaagaaaatgtaaataatccgataggaagtgagttaacactttatactggaaatgaagcggatgttttagaaggtgttaatatagaatcgactattgacgacatgtctcatagtattaaaagtttagcaaatgagcaagctagaatttccgctgacactctccatgaaagcgttgaaaccattaaaaaaatatgtgaagcaggccttaaagatgatgaagaatcattattttataagcctagtttaaatgtaaaaaaatgggttcaagatatacgtgaaatgctttcctcgtatgttgatcaaatgctttttcaagagacggtcaatcaattatatcaaataacagatatatcagaattttttgatcataatggtttccaatattcaaaattgaatatagttactaaccatggtcaagttactgatactgaaacaattaagttacttttttctgatacaatttctataatgtcttttacctttggaatttgcaattttggaagagtagtgaaagatgatattaactattcttctggacatgcaactacaatgagttctgcattaaatgtcccaatttctaatttgaagtttcattgtggttttattgaaaactttatccttttgaatgcacaaatggcgggatttcgccatatctctacactcaatgccactgaatattacttttctggtgaattccttgatagaagatttaaaaaatcacatactaccacatttaaagatgcacttgattcattttattactactcgcaaaacatgcgttcttatcttaaagaatatgccgctcactatttatttgttgaatggataacaaagaaacttgaccgtaattctgcaaaaaaattaagagatgctttaaatatcggaatagataaatgtatcacagataggaaagattttgatgtaaagtatctatatgatgctttagaagctttaaatgctgaaggtataaaacgtccagccaagggtgaaaagaaaaggaaaacgcaagtggttgtagaaggtgctgaaaaagaggttgaggtaccaccggcggtactggtaccagagtttccaactagtaaacgatcaaagagaccaacagctaaacaagttgctatagaaatggcaattaataaagctagacaacctcaagcacaattacaagcacagaatacaatacagccacaagcacaacgtatgacaccaccacattcgcaacatatgtctccacctcaagcacaacgtatgccaccacctcaagttcaacgtatgccaccacctcaaacgcaacttgcagtgaatcagacagttccgcaattttatgaaactgaccaatattcaaactacgcagttggatcatcatcttccgaacaatatatgtctcaagaagaaattcattcaaggaaaagagaaagattgcctttaacacaaagagaaggtcgccctttcaaaattgtaaaggcctcctataatccatcaaaatgggatagaagaggaaaagagtttacacgtcagattccaaagggttatatttgtaagaaaggatgtatatggtgtatgaaatgtggtgcttcacatgctccacgtcatcatgtttttgaattaaatgggaatattaattgggatgctgcagatatttatggaccagatttagatattactgaaaaactacataaaaaacaacagtcccgtagacctcctgttacatttgaatcatatccacactcaccagctacatcagtgaatcaacaaccattagcacctcctcgtggcccaccacctccaccgccgccaccacctccaacagcgccataatgaccgaccgtatagatatactttttataatttagttgtaagtttattttggcccatatccactaaatttttctgtgaaattgaacgtcttctttcaatcattataaattgcatctgttgttgtaaattcaaaatcattgttctttgattgttcaattgttctcttaaacttgagttatcctcaataagtgcacctgtaacagatttattaaattccaattcttctattaatgtctttactttattataatttattttaccatcgttcaaataatttggacttctcactgaagaatcattgacatcattattaataatactttgaaaggatacattcgtcaaacctgatgatatttcttcaatatcttgcgaataccctaagttcttaactttcccatgaactatggaatcaagtatagtactcatttgtaatttcaaattttcattctcatctgtaagttcatttacttttttttctaatttttccaaataaccacttattttgataaatgaacaatcaactaaatgaatactttcaagtaattcacgttggcctttccaattacaaccatattttgttccaggacaattaatgtatattttttgacatgttgattgatgtttttcaaagtacattacgggaaatgatagatggcatccagtacatttaatcatatttttcaaacactcttttttcaaatgattatccagatccattatccttaccaaggaatcacaatccaaacatttgatttctgaatgtgggcatgtttcaattttttcagattttgaatcaatattgttgttacctttaaattcatgctcacttaacatttcatcatctgagaaatcaccaccataagcattagaatcagaatccacaatatcaactccgccatcattgtcgtcatcatcatcatttcgtaccttctcactataaacagctttaacgatttcaaatccatttgtatatgatttctttaataaattattatcaactagtaatttcctttcacataattcaccacatttacatttaattctcgtatgatcacaattttcaattaaatgatttttaacactccaacgttcaccagtccatgaacatcctcgagatttatttaaacaacaaacaattaaatcatcagttatattagaaataatgattggagctggataaatatcagaatctgttgattgttcatcattatttatgtttatatcatcaaattgtataaattcatcattaattatttgattccttatcagagatgatgattttaatgaaacacgatcaagtggacatttttcacctaaaacacttttaaaactttcaaatatgcattctttacaaaatgtatgaccacaaactgtactccaaggttcaataaatggtaatttacatattggacatgttatatgatcaagtgatcttgttgaggataggtattttaaagatcgtaaatccagttgaatttttagatctttgattgattcatcattaaaagggttatagttgaggttaaacccattatcatcggaatttgtataggtttccatttgtacgtgataagatattatagacaatgcttatcaacaataagaagaaattatatcaaagaatcttgtatactttatctcgatggatgagattttatgttgcgaaatttatcttaaatactcaaaagcaaaatcggtttttatcattgaaaaggtattaaaattataaaagttagtatacaatagaatataattagaagtgaatgatatgatatgctatataatatgataagatatgacgtgatatattaagaaaaaaagcgtaaaataataggtataataataaattgaatcaatcaatttaaaattaaacacttgtagtactttcagtatctggtgaaataaatgcacgaacaccattttttctatcctttgcaagtttcattgattttttaacatggaaaccaccagttaaaatatcttgaacttcctctaattctagattagataattcaggataacataaaacaactataatgaatgaaataaaaccaaatcctgcaaataatgagaacgtaccagttggtgtaatattttttaacattgtcaagaaagttgatgaaataattaaagagccagcccaatttgaacctgttgcaaatgagataccaacacctctaactttttgagggaataattcactttgttgccaaggaacattaccaataccaattgcataagatgcaacgaatagaatcattgcaacaataatgacaaccccccatgaatgaatattaccatgaacaactgcatcattttcattaaatgtaattctaataaaatggaaagcaattgcatttagaactaagaaagccacaacacatgttaatgaaattaagagcatttttctacgaccaactctatcaataatgaagaaagctacaattgtaaagataaaattagtaccagcaacaattaatgagacagcagttgaattatcgaaaccaattgcttcaaagatagttgaagagaaatacatcaatgagttaaaacctgttaattgttgaattgcttgtaatgcacaacttaaaaataaagcacggaaatttgaaggtactctatgtaattcaactactgttaaccaccatttcttgaaaggatttttacaatcagagaaaccattttgttcctcttcttgtaaatctaatattttaattctaatatgttcgattggtgtatttgggtgagttttagataaaactttttcagcttcatctaatctattatgcatgattaaaaatcttggggtatcaggtaagaaataaaatgagacaaattgaataactggaggaataattgataaaccaactaagattctccaaccattattaacatgagataaacctgcaccaatggcataagcaattaattgaccaccagtaatacctaaacaatttagaataactaatctacctctaaattttgaaggagctaattcactaatataaagaggagcaactaatgaaccaatacctacaccaaaacccataacaaaacgaccaacaatcattgtccaagcattttgagctgcacattgaataattgcaccaacaataaacataatatttgagaataataatagaggtcttctacctgagaagtcgacaaaaataccggataataaagcgaatatgaaagcacctaaagaagttgcagcagtaatgaattgttcttgaccataagataatggatgaccaaaatcttcaccaatagcaactaaggcagaagagatataaccagtatcataaccaaacatgaatcctgaaattgaagctaaaaaggttaaaaagataatcaaaaaggaaggtttatcaccagagaatgaggaaggagaggttatagttttcaaagcaagttcatttgaaacgtttgaatcattagaatcattggaaatcatatcaaaatttgaattaattgatatatgttcctcgttgtctttatttgagaaatgaatgtcgaaattttgtgaatctgaggtatttttttcttttccttgagagaagaatccagacattatctaaaaaagagtgaatactagtgataagaatatgaatatactaaagaaatattgtcaattgaatgtaagcagaagccttaatataaaataataagtataaaatcagcagttggcgaattggccgagaatgttagtaaaaaatccaggaaagaaaaaaaactgggaaatcgctctccttttatacacggccaacaaacccgggattttcaccgcgctttctagaaaatactttaacctcttactccacttcgcggaattcccgtacgtccttactgtgtgtcggtggaaactaccgagtttgttagcgtaatgggggaggtgagtttttataagcttaggttactaatttcgcagatcatcaaatatcaacatggaaaaacttcaaaattcagttttctattgttgatagttgctacaatttattttgatattggtattgatattgatatattgatatttaattttatataatagtatatcatctctaatagtatggtcaacttcgtgaagaaattgactcttcctctctatgagagtaagtataaggagaagaaagttggtttcaacactaatcaatattccctctttgctattactagatccccatcaccttatgttatcattctaattctgtttgctattttatccactggttggatattaaattgtttctttataggtaattcaaataattattataattataattaatagtgaattatcatggaatgagtgtattaaaccaggttcagatacttatatgaaatttttcactcgtgttttcaatatttatgaatttcatcatattgatcaaaattcaattgatttattaatacgaagttcaaatagtaataataataatgataaaaatattaatattaatatcaatatcaatgaaaatatcaaaaaacttaatagatattccaaaattgaattaaatagtttaattcaagtaaatccaaattttatagaggaagcaaaatttaaacatgcttcaattttgaaaagattacctcaattctcaattaacttatctcgtggtaatggttatgttatggttggtaataaaaaatcttattggaatatttatcttacaattaaattattacgtcaattaggttcaaattatccatttgaaatcattataacatcaattaatgaatttgatgattatttttgttcaaatttaattaaaaattataatgctaaatgtattatgttaaatgaaagattaccgatcaatattttatcagatatgataacatctgatcaatggaaaactcttgcaatcttatcttcaaatttccaaaatgtaatttatttaaattcaaatacttaccccgttaaatcattagatgaattatttgattcacctatatttagaaaacatggattagtattatggtctgatacaaatagaagagaaacagttccatctttttatgaaattcaaaatattaaaataggtaaaccaattagatatttaaatgatatttacacatcatcaaaattatttaaaacaacaaataatgaaaattataatgataattatgtttcatatcatgatagagcaggtacaattcaagaatggacaattaatgatgattttatgttgattgataaatcaatttatttacattcattattattatcattatggtatcaaaatgaaggtattgataaactttacccattaatttcaccaagtaatcaaaatcttgcaggtaaggaaacaattgcagctgctgcaacttatatgaaaaaaacatattatcaagtaagtaggaaacctacagtatccgatattaatggattatctaaaataaaattatttattaactgggacccaataaatgattttataaatctgaataaaatttcttcattaattaacactgattatcaaagattaactgaacatttcaaatataattataaaaaatatttcattgatacttttgaaacaggtgaggttcaatccaccccactattctataatttttcaccaattgatcaaataagtaatccaattgatttatataatcaattagatgaccaggataatatcaacatgagatttttaccaattccaccaaataattttgatattgaaaaatatttagtacaatatacccatgaaatctattgtaaatggtccaatccatggactaaacaacttgacccacactcattatctacactatgtaacatttatctaaagaaccatatgaaggttctcttgtaacttaataatattattatataactgtaataggaaattaatcaattttcccaaaagggaaagagcgccaaaattgataacttttatcaaaaatggaaatttagtacagactttccatttcctcaaattttcatgctgccatcaggtttcaggtttgattggttgtattattatcgatttggattacatctgagcccttttcaattatatctattattagacttttaaaagacttcccattatcaacaatacaaatatgaatgtcgatacttcaaatgcattacctaaagcttatggaagttatcctgattatataagattatctgaagaaattgaacaatttttgaaagaatttaaatctgattcatcatatgatttagatgatcaagttgcagctgatttttatgatagaaatgaagaagatatagaattattaagagaagaaaatgatattaatgcattaccgaaatatcaattattaatgcaaaaaattgcaaatagagaattagagaatattacaattgaattagatgatataattagatttgaaagtttacaaaatacttcatatcaaaatggtaaatcattagcaactgaaattagtaaaaatgctaatcattttcttgaattattttcaagaattattgatgaaaatttacctcaaccaactaaaccaattaatgataaagattcagttttagatgttatcattcatcaaagaagattacgtactaaaactttagaagaggaaagagagagagaaattgcaagatctaatttagatccttcaagaacaggaataggacgattccaataataacaataacagtaataatgataataataataacgatccaacaaatgaattaaacacagcacatgaattatttcctcctcaattattaagacgttataatctatattttaaacctgttacaggtgcaacgggtaaagtgaacaaacctttaaatattagaaatgttaaaggtaatcatattggtaaattaattacaattcgtggtattgttacaagagtttctgatgttaaaccatcaattgaagttcaagcatatacatgtgatgcatgtggttatgaaattttccaagaaattaaatcaaaaactttttcaccaatgattgattgtgaatctgaaatttgtaaggccaatcgtaaacctggtcgtttatttccaagtacaagagcttcaaaatttactccttatcaagatgttaaaattcaagaattagcaagtgatgtaccaccaggtaatatacctagaatgttaagtattcatgttaaaggtggattagttagatcaatgtcaccaggtgatttagttgatgtttcaggtatatttttacctcaaccttatacaggtttccaagctttaaaggcaggtttattaactgaaacttatttagaggcacaaaatgttaaacaacataaacgtaaatatgaaaacttaggtttaacagatgaagttaaggcgaaaattgaaaatttaagaaatcaagataatttttatgatattttagctagttcaattgcacctgaaattttcggtcatttagatatcaaaaaagctttattattattattagttggaggtgttacaaaggaaattggtgatggtatgagaattagaggtgatataaatattttattaatgggtgatcccggtgttgctaaatctcaattattaaaatcaatttcaaaaattgcaccaagagcaatttatacaactggtaaaggttcatcgggtgttggtttaacagctgcagttatgagagatccaattactgatgaattaattttagaaggtggtgcattagttttagctgataatggaatttgttgtattgatgaatttgataaaatggatgaaaatgatagaactgcaattcatgaagttatggaacaacaaacaatttcaatttcaaaagcaggtattacaacaacattaaatgcaagaacatcaattttagcagctgcaaatccattatttggacgttataatactaaaatttcaccaaatgaaaatattaatttaccagctgcattattatcaagatttgatattttatttttaattttagataaaccagatttagagaatgatattaaattagctgaacatgttgcatttgttcatatgttcaataaacatccaactaatgaatttgagacaattgatgaacaaacaatgagacaatatatttcaattgcaagacaatataaacctgttataacaaaggaagttaatgattatgttgtttcaatttatattaaattaagacaagatagtaaaaaaaatgaaacttcaaagaaatttttttcacatacatcaccaagaactttattaggtattttaagaatgtcacaagcattagctagaattagattttcaaatattgttgaaattaatgatattgatgaagctttaagattaattaatattgctaaaaattcattatatgatgataataatgaaattgaggaaacttcacaagagaaaattttcacaattattaaagaatttatttcaaatgaaatgcaatcaacaaagagtaaaatagtttcaatgaagagattacatgaaatttgtataatgaaaaattttactgaaagtgaaattaatgaatgtattgaaaaatatcaattacttaatatttggcaagttattgataatggtgaaaatttaacattaattgatgttggaggaatagatgaagatgatgaactttttgacaccaatataagttttgatgataatgatgatgatgaagaggataagaggaatacctcacaacaagatgttgatatgagttgaaaatattagatgaatgtacttttataactgtgttttatttgtattttagaatagttttataaaaaaaaaagggttatataacttatttaattaagacctaaatcttttttaaccattgatctacaaattggatgataaatcattgcatatttattaaaagtttcaatagctaattgatgatcaacttcatttaacattgaatatgaaggtctaacaaatttcattctaccaacagtacctaaccaatcagctaatttaataaatgaaggtttatgattagcagttaataataatctaaaccatctaaatataacttcagcattttgagattctggatattttgaataaatttttgacattaaatgaattgcatctatacctttggtagatttccaagtaaatccattaataccttcaaatgatactaatttatctaagaaaacaccattttgatttgcaccaaaatctttaatatcatcagaattgaaaaatttagataaatcatctcgatcattattatttattttttcaaaccatttatttgctaaattataacattgatcaactaatgaagtatcaaattttggcattggtggtaaaccaggttgatataaccaaactttccaatcaattgaatctaataaatcttttctatctgaataaaattcatataaagtatctaagaattcataagaatctaaagatttatatttatatttattaaaataatgtttaataaaaggatcaaattcttttgtaccacctaaaatttgttcaatatgaaataaaagattaaaacctttttcataaggaacagttgagaaactatcatcaggatcagttttatcctttaaattttgaattaaagttgagaatctttcagcagatttacccattgaaataattgaattatttaaatcattccaaccaataattgcactaaaatgtctaaaagaatcaccatgaattttaccttgaattcttctctctaaataaacagtccaaccttcatttaaccaaaaatgttcaaatgaacaattagtaactaaattacctgaccaagaatgagctaattcatgagctataacatcaatattttctctatcaccagagattaaagttggagttgcaaaagtacaatttggatgttccataccaccaaaaggcattgaatttggtaaaattaagacatcataatcttgccattcataagggaaaactatattttcagcagttttaataaaagattcagtatcattttcaaattcatatttacatttattaataaagaaaggttcagaataaacttttgatcttggaccaatttttgcatcaactatatcacctgaagcaattgaaactaaatatgaaggaattggaacaggttgttcaaaatgataaattgaattatctttaatatcttttaataaacctgaagttaaagtatttaattttgaattaaaataataagtaaatttagatttaattgaaggagtatcaaaacaagggaagaaagatctagcatgaattggttcacattgagagaaaagataaggattttttttaccatcagtttgttcaggatctaaccattgtaaagcagtacatttatcagttgtttgataaaaaatttctaatttaaattcatcattaagattagatttataattaatttctaatgatgaacctaaaggttcaattctattattaattttataatttgaattatcgatctcggtatcattaatcaaaattttattaattttcaaatatgatgtatcaagtaagattttatctgaattattattaattgattttaaatttaaaatgattgaaccttttaaaattttttcatcaaataagacatttaaatttaaagttgtatgattaacattaaaattataataatttgataaagttgaaggatctaattcaggtgaagattttggtaaataagaattaacaatatctcttaattttggagataaatttgggtatcttgaggtagatgatgacataattcttttacttatagatggaatgagactatttaaaatgatattattataatttttaaaaggatagatgtatttaaacatcaaaagaaagaatttttattaatcaatcctatactatatcaattgtataaatagagtttatttatcttttcaaaaaaaagacatgaaaatggttaaatcttagtaataaattgtgtatgttgatagcaaaatttacataatttacaaataattacattgtcttattattatcattgatatttttaagggccatgtagataaacggcttttcaaaaaatttaaatttattatgtaatcggtatcttttttttaaattttaaaaatattggaagggttgcggtcacgtgtgtgctgtagagggttgcggtcacgtgatttgtaatttttcaattttaacttttcataattaatttttcacttttccacttttcaaattttccagtgcgtctctctttcattttctatccaatttcttatcctcctggagaaaataactttaaaattctcctcaccctcacaccattgggaatcccccgttctcaaaaaatttcatcttactcaatcatattcatttctgaattttcatattatattacttattactgatatattttatattataattattactattttaatttaatttaattcatttttcaagaacttagttaatagtcaagatgcaaatttttgttaagaccttaactggtaagaccattaccttagaagttgaatcttcagatactattgataatgttaaacaaaaaattcaagataaagaaggtatcccacctgatcaacaaagattaatctttgcaggtaaacaattagaagatggtagaactttatctgattataacattcaaaaagaatcaactttacatttagtcttaagattaagaggtggtattattgaaccttcattaaaggctttagcttcaaaatataattgtgaaaaatcaatttgtagaaaatgttatgcaagattacctccaagagctactaactgtagaaagagaaaatgtggtcattcaaatcaattaagaccaaagaagaaacttaaatagattaattatttggttcttaattattattatatgtatgtattttttctatatttataatataatataatatgttgaaataactttaactttaacctttacatttacattcaaatttacatttaatttattaattttatataataattttgaataaattaaaatcttgatataaacaaaaaaaagactcccgtacttacttacacaccttttttttcatgaaaccatcccccacacacaaaatgaaattaatacgttcatttattcaacatcgtaatttaataacgaaatcaactataaatccaaaatctattaatttatcaatacctgaaaatgttaattcattaattttattaacaactccaaaacaattaaatcctttactaaaatatttatcccaaaataatgaaactttcttaaattcttcaagattagaaaatttaatagttgcaagtactgatacaatttgtcattcaagaaatgcaataagtgaattatggattgaaaataatgaaattattaatattaaaaatattgaaaaaactaaaaaaattgaaaataaatcaaaattgcatagacaattagaacctttaagtgttgatccaattagaatgtcaaaaaattggaaagatattaaatatgatggtaatattaatataaatttcattaatttaaataaaaatattaaggcaaatttagcttgtacattatttgaaaataataattataatacatgttttataataaagaaaggtcttgataatgaaataaatggacaaaatttatcaaatattgaaattgaaattaattctaataatcaaataagtaatataaattatagtaataaattaattgaaattccattagttgaagatgaagatttaagagatgaagaatatcaaataacatcatttgaaagtaatatgattaaagcaatcaatgatcaaagtgcatcaggttatttaattgataattcaattgttacatcatcaaagaaggaattatttttcaaattatataataaagataaggaaattgaaaaatttaatgaagaattttattcattagttgcaggtggattaggttggggtgaaaagcaagcatttttagttgttgatccaattgttggtaatgttggtaatagatttgttaaattatattataataaaattgaattaaaaatgccaaaaattgaaagtaaagataagactacaattcaattagaagtttcagaattagaacaagaatttaatgaagttgagggaaaagttgaaaatgaagatacaatcattatcaacaatgtattctctattggtagtgagaacggtataatactaaatggtgttaatcacagagctcatggtgaaaacattgaaattgaaatttaaatatatatcctcttaaggtaaaaatagcaacatgaaatttcctcctattttgtagacatcgcgataagtctaccactcaatctcttgtcttgtcttgtttatatacatcctttttttcttgttttgtttttatagatcaattgttttatatagatatattacagtatatagatatccacataatgagtaatttacttgcaacctattcaaaatgtcaatgttggtaatattgttgaacaattaaatgttgaaaatattaaggaatcatttcaatcattacaaagtaaattttcaaatattaaatcaccacaagaatttttcgatgtacgtcattttagtaaaccaagtaattttactgaattacaacaaagggttagttataatttaaattattttcaaacaaattatattttaattattttaatgttatcaatttatgcattaattactaatatgttattattatttgttattttattaacaagtggtggattaattttaattaataaattaaagggagaaaatttaacaattttaaattcaactattacaacatcacaattatatacaacattaatgataattgcaattccattaggatttttagcatcaccgaatttcaacaatgatgtggttaattggttcatcaactgtttgtgttttctcacatgcaagttttatggaaaaaccaattgaaactgtatttgaagaacaagtataaggaatataaattattactagattgtataagatataattacatactacatataaaattattgttaaatttaaaaatcagccgaaagaagacccaaaaagtatcactcataaattattcagatactatctagcttgacatgcggtggaaaaaatttcatcatattataaattataacaataattttactattaatacagtaaacttacaatatattaatcgttgttaaaagaaagaaggtaacgtaatgatcttattatagtaaaataggaggaataccaactctttttatagtgcgcatagtaaattttctcaaagggttagttaatatgagggtttgtcttagtatagttatatcaactatatgggttatactacttagtatagcgtatatgtatagtatactattttatgattaaaaaagtactaaatttctattagattaagatatgatatattatattatattatataatagacaaatatattaggattttatatataaagtagtaatgaaaacataaattgaatttcctttaaacaacaagattataaacctaacttagttctcttccagtgtcttctctttgcattatatctaattttgttattagttcttaatctaatccattgaggtaatggtctgttttggttttgtgctttacctaacttttgtttgaccttgaaggttttttgagactataatagataacagataataaataatgatatggatatgttagtattctgagcttaatttgggttttaattataatagtatattaatacatacaggcattgttgttcgtagataaagaagataactaaatgtagtatcaatattgtaaaactattataagagatgaaaaaaaattaaattatttactagtatactatactatactattactatacagtattcgcgctgtgcttccgaaaagagtaatgttccaccctcgcacaccttactattttctctctctctccctctctgttttttacttaggtaatacatagtaaagaattttattattattattattattattattattattatcatttcactactgaaaatttcacctaaattaatttctttgtgaaatctttgataacttctacacttttatacatcatcaataactaaaacaaaatgactagaacttcagtcctcgcagatgctcttaatgcaattaacaatgcagaaaaatcaggtaagagacaagtccttattagaccatcatcaaaggttattattaaatttttaaccgttatgcaaaaacatggttatattggtgaatttgaatatattgatgatcatagatcaggtaaaattgttattcaattaaatggtagattaaataaatgtggtgttattcaaccaagatttaatgttaaaatttctgatattgataactggactaataatttattaccagcaagacaatttggttacgttattatgactacctctgctggtattatggatcatgaagaagcaaagagaaagcacgtctctggtaaaatcttaggtttcgtttactaattgtgtttgtatatatatctttaaatgttatatactaattctaatactataatataataaaataatagattttaatcattatcttgtatgtattctatgtgttgtctaatgtagtataccatctattataccatctattatactatctactataccatactatctctactatctatcacagtgcattatacgatcacgtgacatatgcttacctaatcccatttgtgactgctaaatccccgataatacccaaataacatactgatattacgtaatccccccttaacaccgcacacaatctcttcaaaagaaaagaagagaagaaaaaaataaaaaataattgcgagaaaaatcctgggaaaaaagtaagagaattttttttactatgaggatatcctctctctctattatgagatagtgaaattttccatttacttagtattattgatgtttaattacatgatatttcaattttgaaagtatttttcactttagagattgaatttcaatattttaatatattatttactttgattagttcctcataaccaacaatgtctactgaaaacgttactcttggtccacaatcacaaggcactgctgaagttttcggtgttgctcacatctatgcttcaacaaatgatactttcgttcatgttactgatttatcaggtaaagaaactattgcaagagcaactggtggtatgaaagttaaagctgatagagatgaatcttctccttatgctggtatgttagctgcacaagatgttgctgctaaatgtaaagaagttggtattactgctgttcatattaaattaagagcaatgggtggtactagatctaaaactccaggtccaggtggtcaatctgctttaagagctttagcaagatcaggtttaaaaattggtagaattgaagatgttactccaattccatctgattctactagaaagaagggtggtagaagaggtagaagattatgatttatttattatatcttatatcatatatcatatcttatatcatatattaaatcatattacaatgttatattaatatcaatatctccaattaatacatatctttttaataaacatctttttatagtataaaaaaaaatctaaaatataatttgaaaaaattaatttaatgtcctaataactaacctaacctaaaattctttaaaatataaccagtatccttatacaatcattccttcttagatgcatgacaatgatatcatcaatacccaacttatcatcatcatctatattcataatatccttactacttagaatagcattctttctattcggtttatatcaagatgcttatatgccattaccttatacagatattgattatttcgtgtttactgatgctgctaaattcgtagctaatggtaattcaccttatttacgtgaaacttatagatatacaccattattatcatggatattattaccaactacatataattcaactttatggttttcatttggtaaatttatattcattatttgtgatttaataacaggtttattattaattatttcattaccaattaattataaaattttatcaactatttggttattaaatccaatggttataactatttcaacaagaggttcatctgaaagtttattaacttgttttatattattaagtattttcacacttataaaatcttcaaataattcaaaatttggtacttttattgcaggtttactattaggtatctcaattcatcttaaaatatatccattcatttacattccaacttcattattatttattgattcaaatcaatccttctggcaaccaattacaattaaaagattactttacataactggtgttataataggtttctcatcattaacttattggatgtacatcatttatggtatggaatatttaaatgaatcttatttttatcatttaataagattagatcacagacacaattttagtatttacaatgttttattataccttaattcagcaatttcatcatcatcagctgctgctgctgctgctacatcaaatattataaaacttgaaaaacttgcatttatacctcaattatcattatcacttataataatccctcttacattatcaattggatttaattcaaaaaatgaaacatttagaaacttacttctttataaaatattattcatccaaacatttattttcatcattttcaataaagtttgtacatcacaatatttcatttggtttttggctttattacctccatttttagtcaactctaaattaattaataagaaaggtattatattacttacaggttggatagttactcaagctttatggttatttaatggttggagattggaatttaaaggtactccagatattttcactacaggattattcgtttcaagtgcattatttttcctttggaatgtttacattgtttcggaattaattaatgatgttaaattacaaattagcaatgaattgaaattagttgataataaaaaggattaattgtataacttattaattgtataacttatatgtcaaaaacactcaacagcaaatggaccacaactatatatcacaactatatatcatgatgatgtaacacatgtgatgcgcacaatgttactattaaatttgaaagtatcatgttgcttgattttattaattacctgttacaccgcttatctcttttcttttcaatatattgcggtattcattatagcaatatactatcaataaacactagcattataggtacaattacacttatctatccattcatttaatattccagatactatattggaataatattcacttaaaaaatttcaattccctcgtatatctcgtataaataattaatttagttaatataatgtgggaaacatttgaaattcgttcaaaatcatttacaattaaatgggtcgaagtaccttcaaattctaaaattcaatgggatttaaaacctttgaaaaattcaatatatttaggtatttatcaaaaaccattaacaacaaaggaaaattccgtcggatatagttcttcaacatccacttcactggttgaaaatttaaatgttgatgaagttaatgaaattccacatggattttttcaatgaaaataataacaatttgaataataaacatcattctggtggctcaaaattcaaatttaccttcaagcaagaacttattcatcagcaagtactgattcaaataatgatttaacttcattagaatctaaattaggataaacaatttaataaaattaattgggttggtaaatgtgcaggtggtcaatttattaaaggatctgtagattctaaaaatggtggtttatatgcatttgttttcgataatacattttctaaaactaaagctaaaactgttattttcaaattcgaaattgaaaatttcaaataaaaatagatctaaatcttcaactcctcttagtgatgatgttaatgagaataaaatgaatcatcatgttaaatttgatgagaatgaaattttgaaaactaaaaagaaaattaatgattcaacaattaataataaaagatcgagtaagattattaatattaatggcattcagtatcttcagggtttcttattaaagaaaaagagaagaaagggtagtgctaaaacctttaccaaaagattcttttcattaaatttaaattatgcaattttgaattactattcgaatagtaatacttcaacaattagagggaatatgatgattacacaaacagttatctcagctgatgcaagtgaaaatttattatatttagattctggtgttgaacaatggactttaaaagcaactaataaggaagattttaaaaattggattcatgcatttcaattttataaaattccaatacaaaaagaataatgatttgaaaaaaatttcaaataatcaaattcatactgcaattgatgatttattaagtaataatgagcaaacttatgaagatgatacagcttcaagtgataatgatgaacgaatatgatgattttttctctgttaaaagtgatttatcaaaaggtaataaaattagtaaatcaactacatataatccacattttcaaactgttgaattaaagattgaagaattgaaggaaatggttgaaaaagttaatcgttgaagaagatagcaataatgatgttgaagaaattgaaaaattgcctcctcaccctaaattaaaaaattcggtgggaaattcatcatcaggtaaaactccgagaaggggatcaaaacctttatctttagatattccaacaaacaatgcttcaagtactccattgatgaggaaaccttcttttttatcaagattgaagaaaagaagttctaattctgttccaagtactccaatagatagaagatcttttgatatagaaaacacaaacaatagtaacacaacaataaataataataataacaataataactataatgattatagcattgaagaagaaaaatcatctccattagttccaccggcggaaactgtgagaagtcaagcatgctcagtttcttcacttaattcatcaccagttatcggtacaattttagaaacaaggaaagactcagttaaagacagttttagaaaaaataaaagaattagaattagagtattttgaattactgagatcagataatgatatgcatagatctgaatcaagaaaatcattaactcgtacaaacactcaagcaaaatcattattatcacaagaattttacgatgcacaagaatatgttgatgaaacaagtcatggtgttgttatgttatcaaatgatagtgatgaacaattagttgatgattctaaagaacaaactgaattaagttataatattttccaaaaagatttacaaatgacagcaaatgaagttttgactaacttcatctgatgaatctgaatcggaagataatgagccagttcacagatgataatgttgtaattaaactgagactgcgcctaaacctgatgttgatgaaaaagatgttgaagatgatttatatccattaccttataagggtaagtatatcccgagaacagacattaaacctgcagcatgtgaaccaccatcattaatttccatattaaggaaaggtattggtaaagatatgagtagtttagcgaatgcctgtttcaactaatgaaccattatcatttttacaaaaatacactgaaagtttagaatattgtaatttagtaaatgatgcaatgaaatcaccaattgaaactggagaaagaattttaaaaatttcagcatttgcaattagttttctttcatcatataaggaaaaagttagatcaacacgtaaaccatttaatccattattaggtgaaacatttgaattgattagacctgatttagatatacgtgttataactgaaaaagttattcataaaccatttataatggcctcacatgttgattcaactaattggtttattgatcacacaatttgtccacaacaaaaattttatggtaaaactgctgaaatttcaattgatggtacattaaaactaaagtttagagatagtgaagaaacttatgaatggaatcaacctaatacaattttaagaaatattgtttcattaactggtgataaatatacagagcctgttgaaagtataactgttaaatcaaataaaggactaaaatgtattgtttcatttatacctgaaaatggtagatttacaagttcaagatctgaaaaagttgaatttaaggtataccatgacaatgataaaaagaatagtaaaccattaaaattaaatgcatcaggatcctggacgaatgaaattaaattaaataatggacaaattatttggaaaatagctaaaccaattcatcaaagtgataaaaaatatggttttacaaaattttcatgttgtttaaattcatttgatgaaattcataatgattgttcaccaacagattcaagaagaagacctgatcaaagaatttatgaagatggtaaagttgatgaagcagatattttaaaacttaaattggaagaagatcaaagaggtagaagacatgatagtaatggtaatcctgttactcataaacctgcatttttcattaatacatcatcatcaaatcttgattggaaatacattcacggtgagaacagttattggaatcgtagaaaacatggtaaatgggatggtttagttaaattatggtagaaattaacgtaaaaatatattgtattttaaggtataagaatatgtataattaaagaatattatttatttatttattataaagttatcaatcttttacttctctaaagaaatatttatgattttgaccaccagtgacgactaatctttgatcagttaatacagaatcaattgaaaatcctggtacatcatcaatattattttgattatcttgattattacttaaatgaggagataataataaagataattgttcatcatgattgattgcttcctcaattgcattttcaatagcattttcaacaatttctttctcatttgatatattaatgaaaataaatgaagcaaaaattaatactatacccaatatataattaaaacttattttcataccaccattaaaataagaatctaaaaataaactaattggtattgcaagtgataatgataatgaaacagataatggagatagtaattaatgatgcatatgaaccacaataatcagataatgcattcaataatgatgacaatgttaacattattaaaatattataattttcaggtaatgataattgttcccaattaaaataattaaaaattaataaaattggtaatccaaaaataattgaaattataccaatataaccataaagtaatgaattattatttgaatctgtttgttcacctaatttaattcgaagtaatactaaaaatgctgaataacagaaagcaccaataattgctaacatatcaccaaatacttcagaatgtttcccccaaatgaaaactacagttgtagttgataatgttatcagtatgataccaaataatgaacaagagactgaaattaatttaccaaatgtgaatttctcaattttaaataaaacactgattaaaagggagaatactgatgatgaagttgctaaaattgtaccatttgaagctgatgtatattttaaagctgatgtaccaagaaaacaacttgatatataaagaaatgcagcaaaagctgcaattttaataatttgtaaatgagataattcaactttgggtatttgtaaactatcaataaatgataaatcattatctgaatttgaaactgtttcataatttgatgattgatcattcaataatttatcttctttatctttcaattttataagttcataccattttttaaacacagctgaaattccaaaaaatgtgaaaaaactactgtttaaataagcagcaaataatggatgtgcataatcagtatatttcataactctatttaataactgaacagaaagaatccaaaagaatacaccacaaaataaataaaatataccagtgatataaacattagtctcctcagtagcaattatatcaacaacttcataaaaaatttgatcaccagtgattaattcatcttcatcatcattctcattattatcaataaatgaattgcttttgaattgttttaaaacttggagattttgaaagtatcagattagtcaaaggatcatgaaatcttggtgatttaatcaatgatttaggtgatttaaatatctttgcttctgtttttctatcactatccattgtgtatacaacaattggttaaagaagttaataaaaagaaaagaaaaaaacagtaattgatctgatcattaacataaatttaatttggcaaccccttctgataagaaactgagtaaggcggctaagcgactaagaaaaaattttacatgttgagataagcttatattgtttacgtaagtggggtgataacgggtaacttgagtgatatcttgtaagtaggattggaagtaatgctccatagtataacattcatgagatgaaaaacattgctggaccaaatcagaagaataatgtaacactgttccaaagtaaatgacaaaaaattatccacttgtttgaaatactagtgctaacataggctagtgtagacactaaagtattctatactacatcgtaaatatttacaaaaagttcacccacttaaacaatcacccgtttgattcattgaaaaatttgcatcatataccttagaattattttactcctcgcacagagtacaatgcccagcctaatagtataaattgcctgacaatttcttaattcatatacgttaatttccaaaataattcttccgttaatgtagagtgaactaatcgattggaagataatttcgggtgaaagattaataaggcacaagagaagggggaacaatttagcgaaaatttgtgggtgggatcacttactaatactgaaattgaaattaagcgatctgacaagacattgtgttctgaaaagggtaatataagtggctagaacttatccactttaccacagcatgtgatgtaacatcgaatttttttaattatataagttaaattaatgagagtactgagccattgttagatcatgatatatagagagttataaataatatttaagtgttcgtgtaattcaaaatgaaattgaaaataaaaattgaaaataaaaattgaaaataaaaatcgataatgaaaatgaaattgaaaatgaaaataaaaatgtttctaagggagctcaactatgtaaactgagaaaatattaatgattccagatcaatcaataaatcaaagttgttataattgtaattattcaaacataaaaatcctgtattaagtttgaataagacgaataagaagaataaggaaaaaaaatccaagatatatctgtagttaatagaattgaattgaattgaattgaattgaaaacgtaatagaataaactggaaacacaaagcatgataataaaatggaaaaaaataagttatcttattattttttttttctaatttgtaagtttaatttgtaggaaagttgagataatttttgttatttaatataattcttctaatcagaattacttaaacgttttagtattgcaggtggttgataaaatggattagttgctctactatttggtggagaagtaattctttgagttgaattatttgattttgacattgataaactatttaaagttgataaaacaaatgaaccaacagattttgatcttaattttgaatttaattttaaatttgaatttgaatttaagttactagtaaaactgctatttgaacttttagatagatgaagtgtaagattttgtatatcatcaattggagttgtaggagttgaacttgcagatgaacttaaactactattaagatcaaaataagattttgaaacttttgaatttcttcttgacattggagataatgatgaagtatttgaaattgttgaaataatatcaactgatgaatgtctctttttacgtaatttttctttaattttatttgtataaattatatttgaaacacttgaaaaatcatgtaatgaattataatttgaaggtaaagtttcaaatgatgtcgttgataaattattatgaggaatttcataagtatttggaaaatcaaaagaattttcatcaaaattttgatttaaattaaattcattagggaaaaatgttaaatcatcaaattgactattatcttgaattatatcttcattttgatcatcatcatcatcatcatcatcatcatcatcatttgttttaattgtaacattattgatgaaaaaaagtatcctgattggtatcatttggataatctgaacccattaataattgttcaattggatctatatcattagataattgattattattagtaatttcgatgttttcaatactaatattatcaatatcctttccattatgattttctttatcacttaaggaaaagttatctaaattttcataatcataatcataatcaatttcatttaaatcattattattgttgttattgttattattaatattgttaaataaatcaattgaatgaattgaatttctaacatccatcataatgtattaaaaacttatattcttatattttatatttaattgttgaaagtgcgatgaagcgggggagagagagagatatgttgaagagataaggaaatgttaaaagcgtgaaatagcaaacagagagcaaagcaaattaaagcaaattaaagcaaattaaagcaaattaaaataaagctgtttaagttaggttattgttgaattaatgataataatctatggtatagtctggtttgtttattaaaaaaatagtaaaagattgtagaaaatgatactaatattgaactgataattatgatgatatgtggtgtagttttgaggataaaacacagaagttctgtccaatggaatgggatatagatgaaatgaatggaaatgagatgagatgaaggaccaagaagagagagatattattaaactaaagtaagttaataaattagataaatatttgactagtaataaataataaatgttttcaaatcatagaaaataccaagcaataatcataacaatataagaaaatcattcaagattgaaaaataatcaataaaaggtggttatattattataatagtaataataaaatttcagatgaaacctgtgataataaacccaatacaatgttacaatgaaaaaacaataagggattattgtttaattattccaacggtggtttcagaattatcaaatgagaaaaaacgtacgtatctacacaattattatttatttttcccatattaatatattaccgatatggttattttagttatttataataattgattgaattatttacgatgcttaattaatccttgtacatgtacatagttcaaggtagcagattcagtgaggtaacacatgattccatgtgtagtcactgtagtaatatactcgggtaaaggtaaaaagcttaagtaaaatgtgatgcgtcactaaagtttaaaaagtaggactggactagtcctaaaggggaaatttatagtatatttattatttaatatttaatatttaatattaatatttaataaattttaatttaataataacggtcttattatataccattagctcctcaattattgtatttaattggttatttaattatattaagtatattaaatgcccgcttttatccttttagactcatttcttcatttccccatattttgactagtattagtctaaaaaaaaaccggtattcacgttactaataccctgtctgtatcatttaatttaatttactatatcaatacatactatacacttataatttacacacctaacaacacaaaagttaatcacataatatatacacatgtaccattacccctttcgtaacaatcacatctctccttaaagttaaaaaaaatgaattttttaattttttaccatttctcattttcctattttcctattttatcattaattctcatcttattgttaagcttcgcttgcttttctaagccttttaattaaggatatatttgctatattcttatactcaatacactttataacgtaataaaccttatcaccatcatcttactccagtttcatccctggaatgttctttttatttctttttatctaatcaaatcggagttttttaggtttaatccttaattgttcctcatccattgattctttaaaatgttcacccgttctatgattaacatattcaatttccttaatatctttaatctctttaacctcttttcttgtttcatcttcagatcttttattacgttcctcaattccaagttgaaatggatttttaaccttctcatatttaactccttcagaaataattatcgacccctttctattatcactatcaccactaccacttctgccactactactactaccttttaatccaagtcctttcaactcctcatcttcttcctcttcattatccctttcattgtttaataatcctcgtattgacattttatgtctattagtcattgttggagtatgaagcaaatcctctttaccaatttcctcaaattcaagctttttaggtttcattaaatcttcaccattagaattactttcaatgaaaaatttctccccagttggatgataaactaattcaattcctttttcaaattttgaatattcttcttcacttaatcctttattacttctctttcttgatccaactaaatgggttatcaaatttctttcttttcaataaatttaaatctttattagtatcatttaaatcaagtaattctggaaattcacatctttcaacaccatgttgatgtcgtatatattcatcattgataatttgtcttggtggtgtacttggacaaattgatttattattattaactatattcatcttgctttgtaattctaaactttgtctctctcgaagttcttcatcactatcacattcacttgaggcataattcattaacctttgttctttaatttgttcttcatcctcttcctcttcttcctcttcttcatcttcttcatcttcttcatcttcatcttcttctacttgtattttaatagaattacgaaattccagtatccccatttttctattctcattgttatgatgttcattctcatgttcattaatacaactaccaaaatttctacctgtaccaacattattaacgttattaacaccaaataatttattataattaccattatgggtattactatcaaaataaattgattcaattgtatcacgtttcctatgatgatgtcttggtgttgcttctggtgttcttaataaatgaactttttgtttatttttattaatattatcaatcatatgatgattacccttcttggtattagtttgtggtgataatggcagtaaatcttcattatcattattaccattattattaacatatggtgtagttggagtaaataaaacagaattattttgataattcttataatcaatacttaatttattttgattaaaattattaaaattatttttattaaattcattactacttattctacgaccattattattatattcatttgttgatgtcttttcatgattatttaattgtggtgtagtgaaaaatggattgatagattcatcctttgacggtggcggagttgatggttgacgataactcatattatattcttatcttctttatatttttttcaaaaaatttggaatattatttggttttctgttcaatgatatgatataatgtccgacctttgtataagttagcaatagtgtccttatgatagcaaagtgaggtaaagcaaggtaggtagtatacagtgaaaggaaaagaagttgattgttattaatcaataataactaatttgatctcattcacaaagctgaaaaaagaatattcctttgttgttattgtatgtttttgttattacttaattatttatgtttttacttagtatttttatttatactgctggtttaacatgcacagagaaccagccactcataataacaataaaatcagcgaatgtttttttgtttttcaccatcgcttgcttatctaatacttaatattttacttcaatatgattacctaataaagtaagtgtcctatttaggaaagtatattaatctataaagtattttatacagtggattcaccatgttggatgtaaaagataacagtaaattctttttctaatttcttcactttcaattgtataatcttctggaaacattggtacatgccaatgaatcatttcaactaattcaacatcaaaattaaattcttcttctgcagttttgaaaaaatttaaatcattttcaagtaaatgtggtctatgtggtgaaaatacaactaaacatttaccaccacttcttggcttcccattatttaatggtttaattaattctttgcatgattttaaaagttttttatgttcactgtgattgaaaactaaatcactcataattaaaaaatctgccttaccattattctcctttaaaagtaaacttatatcttctgttgaattaccccaaataaaaccctctggctttataatatctttagctggtggatagcctaaatggtcaatattatattgtatattattaattaactcaggatctggataatctgtactaataacttttttagcattatttaatgatgataataaacatggtaatgcactagcagatccaaattcaagaacaaatttatttttaatatatttttcataattcttttcaataaaatctcctgtatatatccctgcgttccataataaatgcccccataatggcgatgatccaattaatcgtaaattaatttctgttatattatgtttactttcatctgtacaatattttctctcgtatttaacgaaatgtgcctccggtggtggtggtctaaaatcttctggttctacaaacaatccaccctctaatgaaaattcatcgtctgacattgttttgcggatacataatgaatttgatgaaaagttggttcagtttaatcgatgaaaattatattttctaaatttttcattgagaaaaaactatcaacaaattttctaaacatatcgaattagttttctttctttacaatatattttcttaacacaatacagaaaaaaccactttatataatcaatgataaataaaaaataacagataaataaacttattacaataaaagacaaaagtaatgaaattatggacatgttgtaacttcccaatctgaaggatcatgaacatttggatgatcaagttgtttcatttcatcttcacttaattgaaaacttaaaacatcaagattaattggtaatctagatagtgttttagttttaggaattggaatataacctttttgtaatgaccacctaattaaaacttgtgcaactgaaatatttttcttttcagcaattttaactgcatcctcatcctgaagtctataagcatgtgataatggtgcataagcaataacttgcatatcattctccttagtaaatttacataattcatctctcatacaccatggtgaaacttcaatttcattaacaactggtttaatctttaatccatcccatgataataattcctttaaatgattaataccataattagatacaccaattgatttaacgattcctttttcaacagcttcttgcattgccctccatgtttcaagtctcatctttttaccttcacatggtgaatgaattaatagtagatcaatataacctaaaccttcaactgttttcaaacattcattaattgcagatttagcattttcataaccattttggttattccaaagttttgtaacataataaatatcctctcttttagaattagtgtttttcttaagataattaataataccatcaccacaaagtttttcattatcatataaaactgctgtatcaattaatctgtaaccaacttttaaaccttcttcaacaacttcatctgcattcataacttcccaagtacctaatcccatgaatggaattaatgttccattatttaactttatacttttgccaattacactcattttggttaatgatcttataagagagaaatgaatgttaaggatggcaaccggatcattcacaatttatattgatttgttatcttaaatccactatattaagcgtctatcccagttacggaaatagttacctattcggactaaaattttttccttcctcattatccaccttatcaatttgtaaattacttttgttaatttcttgtgcaacataaatgatattgatatgatttatagatcaaaagatgcagggaggtaagctctatcgattgaatgtaattttaacttaatttgaaaccttgcatttttacaaaaaaattgatccctaattccaaaacataatgtgatatcttaagaagtattttaaattaaaagttttataaaaaattacttatttagttcacaaataccacatccaaggtataagatacttgtttcttatactatgacattattatacagtgatattatgataataactaaccatttaacatcaaagaaactgataactaacacttaccacaacattatcaatgtcataaattttacagtagagtaatgctcgctgagttaaaaaatttgaagcttttattcagtattaacgagccaccaatagttaaatcaagcaatgattattataaattataactacacaatcctttaagtgaatacaaatatagtttataaaattgattagtctaaagcagtaaactattttattcttattctattcttttggtaaaccagtttctaaatcaattaaaacatcatcagtttcaactggaccttcaccaacttgagttaaaataattcttgaaacaccttgagaataaatttccttatctaatgagcttaatgggaaagaatcaaagattttaggcattcgcaggattaaatttatcatttgaccaaccatctaatttatcgaaaaatttataaagcatacctaaaacataatcttgattttcttcttcataataaataacagcatttggaccagcatcaaaggtatatgcaagcaattaattttccagcagcttcatttaataaattgattaatttaataatatttttagatgtatcattaagatagaagatcggaggataagaatctaaacaaacagaatggaaagaatttgaatctttcattgttaattctgcaaatttttggaaatttttatttaaaatagattccttcatttcaatatatctctttggtacaacttcattaattctatattgaaataaatcacttgttttaacagttaattgcataccacttgtacttggaacatcttttttcatatcacttacaactaaaattgctgctttcattgttggccaatgttttctatcagcaatttgaattgcctttgaatcttcaccattttctagatttcccatttcccatgcaacataacctccaaataatgaacgacatgcactacctgaaccttttcttgcaattttacttaattctgaataatcagtaggtaatttatataatttagcaacagatgaaattaatgctgcaaagccagcagctgaagatgctaaacctgcagccgttgggaaattattttcacttataatatgtaatttaaattgtgaaatttttggtaattcattatttgaattttctaattcttctcttaaacttcttaaatctttcaaaacttgaattgaacgtggagtttctaatgaatatgtttcaccattaatccaaagatgatcttccttaaatgattcagagcatgaagctgttgttaatgtttttaaatcattttgatccaatgtaacactgatagaattattagttggtaaatttcaaatctttatctcttttaccccaatattttaaagtagcaatattaacaggaccagtagatgtagcgtaatgaatttcaggcatatttgatatgaattggtgtcgattgattgaaataagatataaatatccttacaaactgtacaacctggctcatcaatgaaatttttgttcaccaatgcattcaacgccaaaacaaaaaaacttgtgcggtacgaaggtgaatttcgtttaaatgaaatgcctgcacattggacttgtgtggatatacattttacatgttaacttaatttaaacagaaatacaaatataacataagtatagatatacaatagaataaaggaatgtagatgataataataataatcaataatttaattaattgagttcagtaattttttcccatttccaaattcttgctttacaatcacctgaacctgttgcaaaataaccaccatttgaattaataacaggtgaaacagaaacgctaataacatgaatttctatgaccttgtaacattatataaggttcaccagattctttatcccacattataacacctctatcttttgaacctgataaaataaattcatcatttggtgtacaacaaactgacaaaacaaaatctttatgaccaacataagtaacttcacaatttgattttgatatattacttggttgtttatctaaatcttttaatgaccataatttaattgttctatctaatgaaccagaagcaatttctttaccattatttgtgaaatgtaactgagtaaactgaatccatatgaccattaccaaattcatttgaagaatctaatctttcaactaaataacctttatttgcatcccaaactctaacagttctatctaatgaacctgcagcaattaatgaaccatcaggtgaaactgcaactgttgtaacaccatcttctatacttaaagttaatgaacattgaccattaaatacatcccaaattctaacagttctatcacctgaacctgaaactaatcttttaccatcagggaaaaaatctaatgaataaatgtcttgttcatgaccttttaaatattttacaattgttctagttgctaaatcccatattctaataattttatcctctgcacctgttgctaaaaatttaccatcaggtgaaaaacaaactgatctaatatataaatcacctgtatcagtatcataattaccattatttgaaattgatgattcatcatttaatcttgcaactaaatcacctgtttcaacactgaaaacttgcgttaatttattacaaccagttgctaaaaatttcccatcttttgaaaagctaacacaacaaacaacagaagtatgatcaaatgaatgaactaatgaaatatcaactttctttggaatacttggattataaactaaataataatcattatgttgctttttataaggtaaagtttgatatgcatcgaaatcttttaaaaatgcaggtattggtttattatgttgagctctcttaattaatgattcttcacttgatttttcaactttttcattattaccgttttctatcttttcatcagttgatttttctttggttttatcatttgattcattattttcattctttttagcatcattcactaaacctttatcacttggtgaagaagatttctttaaatcgtttatattatttgaatctttttcgttcttaattgtactattattagtgttgttgttagtgttattattgttattgttattatctaatgaagatgtaagcggtggtaaaccatttgataaagtattattagaaggcgaagttgagccttggaaagtattaacagttgaagctaaaggagctaaaggagttaaattagaatttggtaatggtgcacttaaattaggtggaggtaattgttgagcgttaacttgagcttgttgttgagcttgaatttgctgtgcttgatgcttgtgcctgtgcctgcgcttgtgccttgtgcttgagcttgtgcttgtgcctggctgtgcctgagcttgagcttgagcttgttgttgagcatgaacatgagcttgagcttgttgagcttgaatttgatgatgttgatgttgttgttgaagagaatgttgttcaagaagacgatcccttacatctaattcttgttttaatttcataatttcacgttcatatgcatccttaattgatctatgagcttgttctaattcatatacagtattactgatatttgctaattcttgatgctgttgatttaattttaattcataatcatgatgatcatccttataacgagaagtttcccttgtaagattatcaaactcagcctttacagcatccaagagttcatccaaacgagcacgagatgacattgcagaatcagttgtggaaagtaaatcaaataaatgtacacaatttcagttccaccatataactaattcataacaataaatttacatcagcaacaacttgtcaaattaaatgacgaaatttctttttcggggaccacggtcgacgggtcgcttattatgtcatcatgttctttattaatatgatactttatcagtaactatatataacaatccacaactgagcatgtttgaggagataaagaattgattggagtaattgatatacaaatcatttttagaagtaatgagtacaacggagttcttggataagggagtggatttaattaagaaggctattgaagctgataattcttctaaatatgaagaagcttatcaattatattataatggtttagattatttgatgcttgcattaaaatatgaaaagaatcaaaaggctaaagaaacaattaaggagaaatttactgaatatttaacacgtgcagaggaattaaaggatcatgtatcgaataattctcaagttgatcagaatggtgaaatgaattcatcatccggtaatacaaagacgaaaaaggtagatcctaatagtaccaataatgataatggtaaaaatggtaaaactgataatgaagatgatgcagagaataaaaaattaagaagtcaattagccaattcaattttatctgaaaagccagatattaaatggtctgatattgcaggtttagaaggtgcaaaagatgcattaaaggaagcagttattttacctgttaaatttccacaattatttagtggtaaacgtaaacctgtttcaggtatattattatatggacctccaggtacaggtaaatcatatttagcaaaagctgttgcaactgaggcaaattcaacttttttctcagtttcatcatctgatttagttagtaaatggatgggtgaaagtgaaagattagttaaacaattatttacaatggcaagagaacaaaaaccttcaattattttcattgatgaagtcgatgcattatgtggtccaagaggtgaaggtgaaagtgaagcttcaagaagaattaaaactgaattattagttcaaatgaatggtgttggtaatgattcaaatggggtattagttttaggtgcaacaaatataccttggcaattagatagtgcaatcagaagaagatttgagagaagaatttatattgcattacctgatgctgatgcaagattagaaatgtttaaattaaatatttcaaatactccttgtagtttaacaagtcaagattatcatacattagcaaatataactgatgggtattcaggtcatgatatagcagttgttgttaaagatgctttgatgcaaccaattagaaaaattcaaaatgcaacacattttaagaaaattgaatcatttgataatgaaactggaatttcaaaaattcaatatcaaccatgttcaccgggtgaaaatgatgcaattgaaatgaattggatggatctgaatggtgatgaattacttgaaccagatttaacactaaatgatttcttaaaggccataaagacaaataaaccaaccgttaatcaaaaagatttagataaatttgttgaatttacaaatgatttcggttcagaaggtaattaattataactattaatcaatcatatataaatacacaataagtatactatgtaatataaaatattgtaaattcattagttcaatttagattcaattcaattaaatttttcaacattattgttagaatctgaaacttttgattcgttaattttgattaaaataaatgaaacatcatcaccattaataaaagcctttgcatcaggattttctaataaatgtaaatctttataatattgatatttctcatcatcattattgaaaatttgataaacataaccatctaacgtaatacttatatcaccaacttgattttgattaatattttgtaataattttaaaacactactatcatttgattgtgcattatttgtatttgtaacccaatcatgaactaaaactgaaacatttttattattaattagattttcatatttcttggtatttttacaagttgcaactaagattaattgttcatttttatctttattattaataaatgtaaaattcattaaactaacatgagggcgatctttatatgatgtagctaaatgtataaattttgaatttgataatgagtcaatgactttctcaggtaatgggaccactcattattgtatgttatatagtatgattatctgtttgaatgtattaaacttgcaatcaggtatattaataatccaagggcttattaaaaaatcatgcgttagaaattgtgacagagtgcctgcattaagtaattttgatttcaagaaaacttgatggctccgcagaattttaagtgcacaatgttaagtctctgatctaaggtttttggtgtaagaaatcttgtatagttgaatgaaccactcatatatgcagtattctacgcgtcgaaggagtagcacagagtctaaatatagtgaagctgattcacagcaattgaatgatctattacatcaaattatacatagcgataatgatgacgatgaaaatggaaattggtgatgatgataaaattgtagttaatgaaatggatggtgttgatagaatatttcaaggtgatattagaacgatgattgtcaacgactaacgataaattaccagttgagagatatttatcccaaactaaggaaaataaaggtaataaaccatcattttctcaatggattgtataaacgtgtcaaaaatttgtttgtttacagggaaactccaactactgataagcatgagaaacttaaaagaccaattataaagccaccctgaattacaatttaaaaatataaccattttaggtagagatagaaatgaaggtggtatacggaaacctagtataccgaatcaacgaaacaagaagaacgaattgaatgagaaattaaaagaatttatcaaaaagggtaaggaaaaaaataagataaatttactagaaactatattaaaagatacagaagttgttaatgtcagtgacaatgaagagcaagttgtagaggagagggagaaagttgaaggacttgaagaggaaatcaaagagttgattcaaaaggaaagagaggaaagagctaatgattccaaaggtcttgatgaagaaattaataagttacttaataaaaagaaagagatagaagtagaagacagtagtgaaaagggggagattatcaacgaaaatgctaatggatatacaaatggtaatataatcaacaataatacagtggaaaacgatactgtggagaatgatattgcgaataatgagattgtgggtaatattactgttgataatcatagagttgatagtgatatagttgattatgatataccagataatgatatacatactgattcaatgagtaccgatgaaataattagtgatgacatactaagtgataaggcagataatcatatagataacatagataaagtcaataaagagatagtcagtaatatatatgataaagagtcagacagtgaagttattgaacaaccaggcaacaacacaagaaagcacacaggaaagtattgttgaagatgattctttagtagaaatcaggccaatagaacaaccacaaatacataaaacaaagagtattcaggaaatacttaatgaaaaaacacatattaaaaagccagatcctattattgagaaacctactataaagaaacaaccagaaattcattgaaacaatcccagctgaaaaagttgatgatatcaaaaagaatagctattttgatgccatcaaaagtattacacgtaaagattcactgaaaaaggttaaaaagagaaataataaaagaaaaatagtgtatagtagaaatgaaagtgagagtgaaagtgaaggatggatattatgatggcgatgatgatgataataattatgtcaatgataaggaagatgatacagataagcttgataatgcaacaaatttgcacagtcaattttggaaagatgataagcgtagggaaaagagtattttattcaaggtggacgataaaaagaatagaaaatataccagtgaattaattgatgttaataaaggtatagaattacatagtggaggattatttgaagaagaggaagatgttctgccaaagaagaaagcagttgtagaaaaacctatagaaaagtcaataaaaaaatctaaaaatggtaaaaccaaggagaaacttaagaagaaattaaaggataaactcaagactaagattacggatatatctgtggatactcctgttgatcaagaagataaagcagataaaccagaaagtatatcagaaggactctttgtaagtgaagactacggagacagcaaggacgcgtcagcagaggacgaccgatgaggaaattgaagagattagcagtgcgcgaattgtgaaaaagccgaaaaaattgaaaattaacaagaattactatgggaaggtaaaatttgtcgaggaagagaaaggtaagaagaatttgaagaatttgaagaagaaggggaagaagagaaagagaagagagaagaacctaaataatgatgaagtcattgagattgtttgtttaagtgattaatattatattatatcagtatggaaagtattagaaatgttgtacgagaagggtggctcaattatagtagttggtagtggaggttcaggtaaaacatacacagttgaaaaagttttaaaagaggaaaatattggtaatgataaagataaggaacaagttatacgaataaatggactcttctgtagagatgattcatcagcagttaatatgttaaaacagaaattaaatgatgatacaaaagttgtaattgttgattttgctgaaactttcactaatggacgtcaaacattattgtatagattatttgaaaatgcaggtaagagaagatttgcagttatagttattacaagagatgtcttattaagagagaaattagagaagagagttcgaagtagatttagtggagttgttgtatttatacctaatagaaatacgtataatatgaagagtggtagactattagctgaaaaatcacaatgtgaaagagagagacaattactcaagagtcgtaatgaatacgatgatgatggcagtgtctccaccagccgtaacaataagtctatcatggatacactgttaaaagaacggataaaccaacttaatttataatacttacgtaatacctcacctcactggtttttctgacatcatgaatttttcagctttttttatgtttctctgaataatgttgaaaattgacatgtattgacaagtaataagttgacaaggtcttcggatgagtgatgatcggggtctgttttcttttattcttttgtatatctaacttttacttataatctaatttatattttaatacacaatttaaacaatggatccaacacatgcaccagattttcaacctcctaatactcacccacctgagtctccaactgttactccaactttaataccaaataaaaatccaattcttaaacccgtattagccgattatctacaacctctggataaacctattgatcctttaacttcaaactctcataacaataataacaataataacaacaacaacaataacaataatattaataacaatagtactactcgtaaacagaaaatacctaaaagaccaactcaacttgaaccttttagttcaagttcatcagatgatgaaattgattcacatggttttcatttagcaacttcattagattcacctccaaaggttcactcatttcaaattgctgatcttgaagaagtacctcatggtatacagaggcaatctcaagatttatcaacttataatttcccaactcatagattgaaaactaaaatgtcttcatcgcataaattcccattagttatagttgcttgtggttcattctctccaataacttatttacatttacgtatgtttgaaatggcattagatgcaatacgtgaacaaactcgttttgaagttattggaggttatttttcaccagttagtgataattatcgtaaacctggtttagcatcttcaaaacatagagttagaatgtgtgaattagcttgtgaaagaacttcttcttggttaatggtcgatgcttgggaaagtttacaatctaaatatactagaactgctttagtactggatcattttaatgaagaaattaatattaaaagaaatggtattttatcaaaagatggtaaatcaaatttaggtgttaaaattatgttattagcaggtggtgatttaattgaaagcatgggtgaaccaaatgtttgggctgaacaagatttaaatcatattttaggtaattatggttgtttaattgttgaaagaactggtagtgatgtacgttcatttttattgagtcatgatataatgtatgaacatcgtaaaaatattttggttattaaacaattgatttataatgatatttcttcaactaaggtaaggttattcttaagaagaaatatgagtgttcaatatttgttaccaaatagtgttataagatatattcaagaacataaactttatctcgatgaaaaggaacctgttaaattagtcttaaataaataaattttaattatttagtattttatataaatctagtatctaattaatatatgaaactatgaaaaacttaaaccattgtaactaattcttctgcagaggtcggatgaattgcaacacaactatcaaaatctgccttagttgcacccatcttaattgcaacaccaaaaccttgcaatatttcagctgatgcatcaccaacaatatgtaaaccaacgactttttcatttaatgatttaacacaaactaatttatatgcagttggggatttatgttcactcatagcataatacataccattaaattttgacttataaactttaacatcatctttaccatattttgcaactgcttcatcttcagttaaaccaactgagcctgcttcaggatgtgaaaaaattgcagttggaacattagtgaaatcttgcttttgatctttaaattcttcaggtccgaataatctatttgataattttctaccagttgcaattgcaactggtgttaacttctaaatgaccaacaacatcacctaatgaataaatattttcaacattagttctttgatattcatcgacaataatttgttctctatcatttaatttaacaccaattttttcaagaccaataccaagtaatgatttacgacccattgtccaaattaattcatcaacaattcaaagttgaattatcagttaaataaaccttcttttcaccatttgataatttttcaactttactgacatgaactttctttaaaattttaacaccttctttaacataagattcttcaactgtatctctaataattgaatcaaattttgttaaaactttatcaccacgtaaaatcatagttgtttcagtacctaaaccattgaaaacacctgcaagttcaataccaatataacctgcaccaacaatagcaactttctttggttgataatctaatttaaagaaaccatcagaatcaataccaaattcataacctggaatatcttttggaataacggtttgaccaccagttgcaattaaaattttatcagcagtgaatttttcaattgaaccatcttcttttttaacaacttcgacttcaccattatcaccaaatctagcaaatccataaacataatcaacaccttcctttgttaaattacgttcatatataccatttaatctttcaacatatgcatctcttttatttttaaaaggttggccaatcaaatgctaaatccagattttgtaaattcttaaaaccataatcatatgctaaatttaatttatgtttcatatcacttgcataccacataactttctttggaacacatcccacattaacacatgtaccacccattgctttactttcaattaataaagtttttgcaccatattttgcagctctacgtgctgatgcaacaccacctgaacctcctccaatgactaaatattgataatgggtcattcttgtctattataacctttgtatacttccacccaaaaagaagaacacgtctacctacatgttacaaatcattgaaaaacttaattcgtattattaagctaaacgattttcctcactgtggctttttctttagatatttaataactgtgttgattatatactgtatattttcaatgtatatcgattcttttatcttattactcttatacaacggaagttaacgaacaacccaatagcaatgtccacagaacctatagatgataccccactcacacgtccatgataaaactcttgatgaattactttctttaatggatgatgcagatttcacaccaataattccagatgctgtaacagattattatttagctaaatcaggtttagatttatcaaatgatgaggagaatatcaaattaaagagacttatagcattagcaacacaaaaatttatatccgatatagctacagatgcatatgaatgttcacgtataaggtcctaacacagcagtttatacagcaaataatcctcaaacacgatcacgtgctttactaatggcaacaatggcaaaggctagaggtacaacatcatcaacaaactgatgaacaaggaacagcagacgatgttgatgaaccaagtgttggtaatggtaatttaaatccaaatggtgcaagtcaaaataaatcaaaggtaacacttacaatggaagatttatcaagtgcacttgatgaatatggattgaatgttaatagacctcaattctatagataagtgtagtgtattacatgtattataaatagaaaaagagtcaaatatatatttgttaccattccagatttttttattacattattattcttatattattattattatacattacatataattgaaacatggaaaacatttccttttccatccatcaatatcccaaacaattacaccttccattgtaccaattaataattgacttttatttgtattttcattacaagaaatttccataccatttatttcaatatctgaatcaacataaaagaatggatctctttgtggaatttcaactatttcttcaggtaaattatcttctaacaagttagggccaaacggccaaatatttgagtaatctttatattcattattccaccacataataacttctttaataattgcatcatcagttatttgataaggttttaaaccactattattattatagcttactaaattactaatatatggtggtattaaattatttttcaccctctgtataaaatcttgtctatcataagagccttgcagtagttatttgtgtattatcattccacatatgcctactcagtcttgaatttaaatatttataactttcaaaataacctaaatttaattcaccaccaaaatgtcgaatatctttaaaatcatcaatattttttataattggttgattataataagatattaaatttgaaggatttggagattcagttattggataattatatttttcatcatttattataggtggtgaatgatgtaaatattttggtaataataaaactgagtgattattaaagtttctagtatcaattaaatgaattctcccctgatgttcagaaatacaaagtaaatcatcattattagcaatagttgttgatttacaaacacggaaagcaccaggttgagttttaggtcttgttgaatgaatttcatgaattggatttgataaatttcgtaaatcatagatcaatgctaaaccatcttggaaacatgaaacaaattgaaatccatttgataagaaagttgtagaaaatccacaatctccattagtatttattatatcaaaatcagattcattcatacttctaccattggaagaggtattatttgaaccggggtgtaaaatatgtattttggaactatcacctagtgtaactaatgttttaccatcatccgataaaattgaatgatttaatgcagcctttaaataagtacttgtagatgagggtataattccggaaggtgttatatgaagagaatataagtgtttatcattattacaaagatatgaaacataatgatttaaggaagatctattaattgaaactgaattattaataaattctccaaattgataactttgaacgttattatcaatatcagtaaatgtaaagctacctttatgtaaaccaattgggttagaattagcattaatcatattatttatacctccggtaactgtaaatccatctagttgtttgaatacaacgaggattagaatgtactttaactgaattacatagcaatggtttatcaagactattatctcttgttaaatttgaatttgaatgtgagctattattatcattgttgttaagtagatcatccacatcatccatatcatcttcattatcataagtttcaggtacttgaatattcagtactttattctgatgaattatcttaaaagaatttgttttattatcaactgataaaagatcctttaattgccaatgtggggatgataatgacacatttagataagtagaagctttttttaagatagaagcagcaaacctagtactttgaggacctgaaggcttactactctgataattaactgttggtatagttgtatcaatagtcattaatttgatgattaaaattcagggatatacagaatctatattagttccaattgtaaaaatttaaaaatagcactaataatagataaggattaagttattatacgggagttcagttcccctttatttcccactcactgataacgtatttgccctggctttcgaatcttgtaaaggtggtattatgaaaattatctcactcaaaggctttttcttgagggtgggttttacatgttaataattagttgtcattacatgggatcgatcttgggtatatttgtttgtttggtaattaacctaacaatggcttctatagtggcctttttagatagtaaggcccgtttactacttttaagagattataaaggtgatataccagtctctgttattgatgaatttcctctattattattaaaacaagaacaaggtttaaataattcatctgaaccagttatctattcaaatggaattagttatacttttattcaaaatgatggtatatactacagttggtataagtaaatgtgatgttaatgttttcaccatattggtctttttatcaaaattaaatgatgcattaattaaacatttcaaaaaattaaatgaattttctataaaggataattattcaattatctatgaattattagatgaaatgatggattttggtataccacaaattactgatgatttggttttaaaagattatataacacaacaatctattacttttgaaaaattaatttcaaatgtttcaaattctgcaacttcaactcatcgtaaaattaaacaaagtaaacaagatagaagagctcctccaacaacaattacaaatcaaatttcttggagaaaggaaggtcttaaatataagaaaaatgaagcttatttagatgtaattgaaagtattgatatgctcattaattcaagaggtcaaatgttaacaagtgaaatttatggtaaaattaaattgaaaagttatttatctggtatgccagaattacaattaggtttaaatgaaaaatttattaatagtggtttaaattcaatcaaaggtttaacaagtgataacattaataatgaattcaataacaaaatcttcaattgaagttgaagatgttaaatttcatcaatgtgttcaattagaaaaattcgaaaatgataaaattataacttttataccacctgatggtgaatgtgatttaattacttatagagttcattcagatatattaaaacctttattcttaattgaatataaatttaaaaatcattcaaatacaagattaggagataatggttaaagttcgtgcaaattttaaaaataaaattagtgcaaataaagttgaaattagaatacctgtacctgaagaaattgattcaccaaaatttcattatcaaaagggtaaattaaaatatttacctgatgaaaatactcttagatggaaatttcataaaattgaaggtggtaaagaatatgttatgattgcagaattaatgttattaagtttagttagtgaaagtgaattaaaacaattccgtaaaataccattaaatataaaatttgaaatgcaaggttttgtaacgagtggtttacaggtacgttatttgaaaattcatgaacctcaccttaattataatagttatccttatgtgaggtatattacaagaagtggtgataattatgaaatacgtagtagtaacgtataataagtatctcttactgttcttctctcttgtatattattatatagataatataatataaattatgattagagactcttttatattaataattaatgtaaccaagtaaaaaactgattattttatccattctaggaaattttgttttccatcaagatgactgaattttttttactgttgattctgtgccatctaaatctatatgaaagtttatttaattctatatcttgaacatttatagtagacacctaacaatcaaaactatggatattgaacaagcatataacgagcataaaactgctggtaataatgcattcaaaaaggcagattatgtattagcagttgaagaatatagtaaaggtattgaaattttagagaatgaaaatgaagaaactgaaattgttgaaaatataaataaaattgaaataattaatgaaaatttagaagatattagtaaacattcaaagaaacatgctcatgcattagctatattatattcaaatcgtgctcaagcacaattaaaacaagaaaattatggttcagcaattagtgattgtacaattagtcttgaacatgataatgaatttgttaaaagtttatatagaagagcagttgcaatgttatgcaataagagatttaactgctgcattaaaagattgtaaaactgcaagaagtatgacaggtggtgatgatattaaaattaaaaaattaacaaatgaaattagtatggaattaaagaaaattaaatttgagcaagcaattgaaattgttgaaaaaagtatatttacaactattgattgggataatgcacaacaagaaaagggagaattgattattaatagaggtgaaaatggtgatattgagattgttgatggattaaatgaagattatattagtagaatgattaaaaaatttaaagaaactgatgaaggtggtttaataaataaaatggatgcatttgcaattattaatgcagcaaacacattatttaaaaatgaaagactgttagttgaaataaatttcaatagagaattaaagggtgtaaaagaattaactatttgcggtgatactcatggtcaattttatgatgttcttaatattttcgaaaaatttggtaaagttagtgatgatcatgtttatttgtttaatggtgattttgttgatagaggttcatggggatgtgaagttgcatttttactctattcattaaaagtattatatccaaataagattttcattaacagaggtaatcatgaaactgatgatatgaattcagtttatggatttagagatgaatgtaaatataaatatggtgataaaatattcaaatgttttagtgaatcatttagtaatttatcatattgtacattaattaatgaagaaatattagtgatgcatggaggattatttagtgatgatagtattggtattaaagaattaagaaaattagattatagtagacaagtacagggacaaccaccaaagaatggtattgaaatggaacttttatggactgatccacaaagtgaaattggtagatcattaagtaagagaggtattggattacaatttggacctgatattactaaggcatttattgaaagaaataacttgaaatatattatacgtagtcatgaagtacgtcaaaaaggttatgaatgggaacattatgataaattatgtacagttttcagtgcaccaaattattgtgattcacaaggtaatttgggtgcagttgttagattattaaatgaaggtaatgagattaaatgtgaaagtttcagtgcagttccacatccaaatattccaccaatgaaatatactaagaaccaatttggattttagaatttcattatgcattttatgtattatatatagagatagtagtattttgtattcataagtaataatagcataataaaacaaacaatttacaatgaaaaaaaagacatgtacgtttatgaaaaagatgaaggaacattgttaaagaaccaacaccacaagaatttcactaaacaaagacgttcttctcggagacgttgtagaggggggcgatcttatatttggcatcaaccaccctacaatatatacggctcctcaatgagttacctaaaggaagaaacgtcaaaggagagtttatactaaatggaaatagcgaaatgcgtttcttttatagaaggaaaaaagttttaagctgatttttcagggttttgcttcttttaacacaatctctgatcaattgttaccatattagagaaatagcaatgaaagtgtggacactagtgtatatactgtttcttatattaggcattgaaagtttgtcattacaaatagtagacaaagatgatgatagtggaatgaacgatatttcaggattagaatatatcgttatgaaggaaggtaaagatatacataaaggtcatttcaacagtaaaggactagcccaattagactcaaatcttcctaccaatttcaccattgtagtaggtggaatccactacgaatggacagctgttgatgttaacaataaagatgatgatataaccatcagcgtggcggtgcagaaacgccaattccacattgcggcgcagtcgctattagaaattgtgtgggcctatattaagaagagaccattactaactggtgtatctctagtggtgattttagtggcattgttaccagctatacttattaaactagatccagactttgccgatagagtagctcaaaatgctatgaaagagaaagagcagtgaggtatataataagtataggatgttaaccagccacccccactataataagtggcacaattttaaaattgtataggattgttgatagcgtgaattattttgcatctagtctctctgataaagcccaaattaatgtgcatataaaatagtttctttttttttccggtacctttttttcttctccgttcctcttggtcaaagataatctatacagccaatgctgttctcagtcaccacagttggtctcttaactgtttggtatgctacttcatcactctcaagtcagcttaataaagctatactagtgcagttcccattcccattatttttaacagaaagtactctttctaggaaatatgatattggctctaatcactgcaataattgctaaaaattatcccccgtttcatgctgcttttccatcaaatacttttccatcaaatggactaccatcattcacaaaacctcttgcaaaacttttcttaccaatgggagttttccaatttgttggtaaattattagcactggctgctacaacaacttgttcagttgcaacagtatcctcaataagatcactaagtcctcttttcattgtattaggttacagaatattttataaagttgcatttcctttgaaaacttatctctcattactaccattattacttggtgtaatcatcgtcgttctctcacaatcttcaataactcaaataaagtcagcttataccattaatgaagataatacagaaactgttttggaaccttttaatatgtttggaataatttatattattatggctacttcagtttttgcagctgggtcaatttatgccaaaaacgttgtctcaaaacattcaaatatcaactgtttagctattggctctcatcaacataataaatcagatattgaaaaatcatctttatcacctacaatcctcaatacccaatcatacccttactactaataatacccacgatcgttatcaacattatcatcaacatcatcatattgataaactgacaactataatttattgttccatttacggtttattattttcaataccaacatttttaacttatgaattgaaaacaattttcaatttcagtgtaatatctcaaaacatttcattatccttattactcattgataccttggcatttattaattgttaatattatttcttattttgctcaaactttacttgcatttcatttactgacaatcttaccaacaatttcatacagtatcgctagtatgatgaaaagaattataattattgctattagtatatttttacgtgatgcaataaaccctttagaatggttaggtttaatacatatcgcccttggtttatacgtttatgaacgttggggtataatctattagtattctatctaactagtttattcagtttagtttagtttatcttatttaaaattgtatcttatatattcaccatttaatttaataccaccactaacaatttcaatttttttacagtcttcaccgaaacctagtatttcaccatcatctaaatcccaaatacaatatttcccttccacatcaatactaactgaaatactttcatcttcactacattgtatctcttcaatccttacttcatgttttcgaacacagtatttcacatattcacctccaacttcccgtgctactttaccaacacggcaattttcaattttttgttttgaaaaaacctttattaacccattagcatatccaacaatcttacatttatctccaacttctatttcagtacctttcaaaacaaaaattgtttcatcatactttttatcaaacacttttctttgaggatgtgcagcttttaaatagttgagttggaacttgtccaaaattaaagatagacgatactcttatttttttactatgtctatcttcatcatccacccattcataactatttggatggaatacattcaaattttctactgcagcttcccccctttgtttaaatccaaatataagatcaatccaatgatttaaattcttactcacatattcactctccaaagcatctctcatcactttaataaatttagtaacatcaccttcactccacttgggcaactcaacactactcaactctaattcttgaccactaccaacaagaaattcaggcatgtaataaaattcaggtatcagttccctaacatcagcagtactttcaacaccacaaccaatccaagttctcaaaatagattgaaattgcctatctttaggacctttaccaccttgcaagttaataaatatttgtctaaaaggttcaagccttactaaatacgaactaacactcatacttgatgagtaatgtgtaccataattgaattcaccacccagctcatatctttctttgaattgtttacttctttcttcactttgagcacccattggcaatttcaaatccctatatacattctcatctttcaaatcaatatttgacgatgtataatctttcaaaatccaagggaaaataggatactgtgataaatcattggtacttcgtcccgcaaatttgttcaattccatcaaatatgtaaaattactcattttaccattcgtccataactcgacaatttcatctaatccacaatgagaaggtttagctcccatgattcccgttactttttttaaaatcaaatctctatggtaattgtctttacaagacataaatacagactcaccacttttggtaaataattcaagtgcaacatctcttaacaagaatcgtctttcactcacaattttgatatctttatacgcaatcttttttgatttcattgcccttttcacatcattagttccacaaacttcatgcaatatttgtataatctcgtccctctcatcatcatcagcttcttgaatataacacatttcatcgttctgctttttccaatatccttctagcatatataaatgtgtcaaaccgattatcaaaataccttcattggcttcaattccatgaattgtggcaatattgaatatttgttcaattctatcgtgaacaaataactcacgtaatatgcttcttgtacattcaccagtcaatatatcatcaaagattgggcttgaatattcttgcaaaataaccttatcaacaattttgttaaacttattatcaatcccaactctgtttttgagaatccttttcttttcttgattttctaccattccactccgttctttaagctctaaaaacttgtttataaaaaacagttcatctttgttctcatcacaaatatatgactgaatgttttgtaattctgcctcataaatatttttattgaatggtttaatctctttgttaattaagttttcactcctttctaactgcattttactaaaaatgtatgattttatagttttgcttgaattattcgtattagtagctttaaccaaaaaatcacgatatgtcttatccatattttcacctacttctgtttcaataaacgcaataaattcatcatcatcaacaccagttgcttcttttagtttgttaatccagacaatgtcacctttataatctaataccatcaaacgtatgcagttggtactcacagtcaaaacatcattcttctttaacaacctattaaaaatagaaaacaaaattaccaaacaagtttcatcaatgtttgacatgataaaactaaaatgtgccatatatatttcacaacatttgataacattttcatccatttttttttcaacaaagttgataaataatttaaaataagcattcaaaaatttggcaaatattttatttctcttgaaattgacggtttttttaataacctcaatactcatttccaaaacaattagaatttcattatcatccatccaaacttcatccaaacaatggtaatagtcttggaatatgttcagaaaatttcctgattttttatatgtttctaatttgtcaatcaacatcggaacaacaacagcattaaattccaccgggaaagaagagctaatcgattccaaaaggtcaatattgatatctccacaaactaaccattcattaactatgcttaaaattcttttctcaacatcacatgtaccattttgtttaattatcattgccaagaaaagtacatttccaatccattcaatatcacaattgaataattcactatttgctgtcactttgagtgcttttaggtattgtgtaagtcttttttctgattctacagtgctgtctagactcaatgcacaaaatttcattatattattcaagattcccaaaaaatgtttatgacttattactgaggatttactgaaatcatcaatatgtttaataccagtgctagcgccttgatatatacttaacatcaatccatcatccatccaatcatttcttaaatagttagttaatagagggattccaccgaaacttaaaaaatctgaatatgttttagaattggaattaatcaatctaatcatcaatttgagcccttgctcctttattttcaaactaccttgtaacgtagaaaacaaaaatttaaagttaagatatcgtagtagttttgcattttcctttatcaattttgaaacaaggtcaagtaacatggcacattcatcatcacaatcggatgcattaatcatatacacaatggttgttagcaatgatttaaaagtctccggagatgaatcagaacgtactaatatccataaaatattatcaacattcaagagaatatctttaccaattaaacttcgcttcagtgctaataagattcgttttaagatcttcatatcggacatgtaaaccaaatttacctctttatatttggtatcttgaataaaaattatcaattgaaataccatgaattttcttatttcatttatacaatctttccaaatatggaaatcaaaaataagcattctgaatgctagcttgtttttaaggaatgattcatcagaattaagagtattataacccacaaagttcaatattaaattaaccaattcgaatgtaaacatgcggtttttttcccttaaaataatacctaaaatataataacccccatcagcaacaaattcttgttcaatttcactgcttgtttctaagatgtatagtaaaaatgataaattatgaaacaaatcattttcgttttccgacttttcaagagtgtgaagacagtaagtataaccatatatacaactaaaagattcaagcatcgagattcctcgtttccacttcaggcctgaaacatcggtattaaatgaaataagatcactattttcatcagtacttttatatgtacccttgttttcggaattccaaactaacttaacattttgtttacttagtatcttatcaatattttcaacatgcttaaatttaccatatacatttataatcaaggaactatactgtgacgatgttaacaatgatgttggtttggatagttcaaaatatttctttatattttcaccaagcaaatgtatataaaatatccaaagtttccaatctcttgtttcaaccattaacacatctgaaatttcaattactataggagattttttttcttggtttgaaatagtcaaattgtataagttatgtacttctttatcatttttgaacgacaaaagaagcttttttgtgaatgacgatgataacttgttgccatcagtgaacaaacacttaaataccttcgattcaatgaaaatcccattaacatatagatcgatttttgatattcgtgaggattcattgatatgtaagaatgatatgttatacttctcttcagtatcaaaactataagatctaaacgaatgtttctctgtcgatgtttgtatttccaatatcccatcatttatgcgataaacaatattagttggccctgataacacaaaaagttcactgtttatcttttctgagtctgaaaaattataaatttgactaaaccgaaccatcaatgataatacaaaagagttgcttgctggattgatattgatattcttgaactgaagttttttgtcttgtacaatcagagaattgagcatcaattgatcagacctaaacatatcttgatataaatcatacaatatagtgcttttgcttaaatttttgttcaaaactcttaactgagatggtgtgaaaccaaattctgacatatccaataataagagacgcaatattgtacatattatcttacattgacaaggatcttgcaatccaaatttcagcaatagatcaattatatttttggtattaaaaatgattctattcatcaatgaagctttaacagtttgataaattactaacattaatgattgataaaattgatgatcctcagaatgattatcatgttgtagtattccagttaaaataacttcaatttttccactagtcgattcatcatcggtgaaaagagcaattgaataatttccaaattgccaaacatttatctcactgtcaatcatgtatttacattcatattcaaacaaataatcatatctattatcgcccttgtgtggcgtttgaggtaactccggaaatttgttccagttggttatcattagcatgaaatcatcagtcgccaaacgtttcccatcaaaccggacaacatctaaaaatgaatccaccaagatacttttctgtagagtatcctcttccataacaattgttttatcaacaaatatataagttgtgattccttgacctttaacaacaatatttagtggaattaaatgaaattgttaaattttttcccctttaagaagaggccgcattatttcgaggaagggaaaaatatttcgtttcccatgagaagagatggatgaactttcatgttatattgattttgatttttgctttgtttttgctcaactatattacagagtcctataagggaaaaagcttatattatatacacacataagatcgtattagattagtaaacaagacacgcttatagaatatgactgaatcatttgagagtgctggtcacaactctgaagggaatggactcaatgcagatcgtccactccacgttcaacgtcattcacacgatcgtctacaactagagaacagatccctatcgaatagaattgattcaccatctctaaaatgctcagatggtaatgttgtagatgagaatcaatttaaaatgagcagtaagcaacacatgctgataacagagtcaaatactcatactccgctgctaacatctgagacgaataccgaatatgaaaatataactgatattgaagatttatctaatattaaccagttagcagatgtaagtaatgatagtacatatgaaaacaatattgagaatgaaaatgaagatcaaactggtggtaataatgcacatgaggaaaacacagcagttaacaattcttctactgtcaataccgcttccgatgatcatctacctctacaaatatcagactatcaacgtcttacttacattagacaagaatattcaaatatccaatcacaatcaaaactttactactacatcgataaaaattggttggagttatttcttaatggaaactttgatcaatcctcattcaatctagaaactaatataggtccagtgattactttgacaaatgggttactactggaagacattgaccctaaacaatatgagtttataccgcaagaacaaatgaagcatcttgtaactacttttagacttggtcaagatcaactaattatagaaagagatatggtttttccaccatataaaaaaccattcattgaattatatccattttccatcgtgccgcatatttttattagtaatgcaagtcatgttaacagatattctcagttgaatgataataataagtctcaacatgaattgagagtttctcctcaaaattccgtttctgatttgattgaaatgtttttgagtactttcaatctaatgaatattaagactaaagatttaagattatgggtaatagaatttaattctatgaatacaccaactgttataataccatcatctttgaaagatatcaaagaaaaaacattgataaatacaaacaaggcatcgaagacaatactagcaaaaaggaacattaaaccatgccacattatgttagaaattagacaatttgatgatttgttttatcttgagataagctcacacatattaccaggaaatggtcttgtaggcctttctaatctaggaaatacttgttatatgaattctgcattacaatgtttactgcatataccagaattgaattattattttctatatcagtttttcgagaaagaattaaatgttgataatccgctaggaaacaacggtaaagttgcaaccagttttgccaatttaatcaagcaaacatttgacaatagatattctggaaataatggtcacttttctccaagagagttcaaatacaccattggtcattttaattcattatttgctgattatcatcaacaagactcacaagagtttattgcgtatttattagatggtttacatgaagacttgaatagagttttgaaaaaaccatacgtggagaaaccagagttagcagaaggtgaagagaacagtgaaaaagccattcaagaattagctcaaaaatgttgggattctcataaacttagaaatgattcagttattgttgatttgtttgttgcattatacaaatcaactgttatatgtccaacatgtaatggtgtcagtataacatttgacccttacaatgatttgacattaccattacctgttaaagctaagtggtctcataaaataaaagttttatcagatgttggccatcctataacattggaaattcaattagaaaaaagctcaatgtattcagatttgaaattagcagttggtaaatacatgaatatccccaaggaggaattaattggtgttgaattatttagaaattctgtttacaaaaattttgaagatagtaattctgattctagatatttaccagtttctgaattaatcagtcaaaatgatgacatttggttttatcaagtcaagcatggcccggaagatcatgtcatacctgtaatttctacagtttcctcacatattttcggtattccatttttcataagcttgactgaaaaagaactatactcatatggtaccattaagaaaaagatgtttgtcaaatatagccaattatctacatctccagttttcaaagaaatgtctagtatatcacatggcgatcataaagctgaagatttcacaaaagcggaagaaataattaaatctcctcaattgaatttacccgatggtttgaaatcattagttttttttggttcagagattgtagatggtaatgatgataacgacaatgaatctattatatcttttgctgacccagaaaataatttagaaaatacgtttgcatcaaaatactgcacttcatcaatggtcgtggaattgtccaatatgtttaatagatcaaacagaggtaaatctctgtcgaatacttcccaattattttggtttccagaaaatacacacagtgttctgaacaaaactttaccattactgacaaaaaatcttaatgatttgaaaaaggtattttatttttacacttcagaaatggtggaagaatatcaaaaagctgttgaaatagataatgttaacaaggaagaagaaaatgaaaaattcaatgaagaaatcaaagaagatagtgacaagaatgaagaaatgttggataatataagctccaactccggtgtttcagatatattatccgaagagtctacagaccacttaaacaatattagtaaagaagaaactgattgcgaagttatgtcaacttcgaatgagaaagataatgaagttatagataacttaggtgagaattccaattctgcaagcttttattctgcacaagatgattttaggaataacttacaatcaagggatgttgcttcaaaagattcagattcagaatccatattatcatctattcatattactgatgacgttgctgattattccccaaagccaattattgaaccaatgtctgtgattgtgaatactttcactgatgacaaatttaacttatatttctgtgatttatctgaagaagcccaaaatggttccgaaacatggtcaaaacctgaagtacttgtaaatgaagaattagaaattgaaagaagaaagaatactgaagatttaaagaaacctgtgacagtttatgattgtttagaactcttttccaaacctgaagtattaggtcaaaatgatttatggtactgtccaaagtgtaaagatcatagacaagctactaaaaaaattgaaatttggtcagctcctgatattttaacaattcatttgaagagatttgaaagtaccagaagtttcagtgataaaattgatattgttattgatttccctattgaaggtttagatctcactaaatatgttagtgataaagatggtgagaacatttatgatttgtttgcggtggataatcattttggtggactaggcggtggccattatacgtcatacgtaaaaaattttgttgataataattggtattattttgatgattctagagtctctagagttgctgatccaagagattcaattaagggtagcgcatatttattattctatcgtaaaagaagtgataaatttttaggtggtgaattttttgaaagtatttcaaaggaagtcaaaagacaaagggatgaacttgaaagtacaattttaaaacatagacttgaatcacaaacttcattgtcatcatcttcatcatcaccttcacctgctaatacagtggatgatatgtcatgttcaccagatagaattgaaaatggagatgtggaagatattgaaatatcagaagacttaactgaaattggagatggtaacaaaagacgcaagataaatagcgagacagatacggaaacattatctgagactaaaagtattgatgttgaactgaatgaagaaactgaggaagagaagtagtgttttctaaatattttattttcaagttttgctatacattttcaaataatgtttttatatgagtgtttattactatgtaaattagtgtttattgtctgttatatattatagaatctgaaagtaaatattgtactgtagatttgataactgtacaagaaagctgcatgctgttaattgttaaagacccggtttcgcattttagagtggtaacgatttttttttcatgtcttaatgaatttaaaatttttatcatcaaaaagatcaacctacttctttaactttcagttctgaacaaacaaataacatgtcagaaattgatggtcacattcaactcaaatcaacgattttttcgccatcagaattagcacagattgcacctgatgttacattaaataaatatattaatgccggatatcgtccatcattacgtcgattcaatgaatttaaaccagtaattatatcaaaggcaggtatatcaagatatgacacatctattaatgggaaagcagaagagatgaacgaatctacaagtgttattggatcatcatcagttaaatgtggtgaaacatcagcaatttgtatgattagtgcaggtattattgaagatgattttgaagcagtcaatgattatagaacaagacttgatgctgatattattgttgataatgataaagaagaaattgagaatgtattaggaggtgaactgttaagtgaaaatggatgtgtttatccagttgttgaaattgctaaaggatcaacgggtccaccaggcgatgaagaagttgaattaggtgaaaaactttttgaaactgtattacattcaggattaataaatagagatgaattaaagattgatattggattaaagagtattgatgaaaatggagatgaagtaattttaaagggtaaagaagcaaatattcaaaagaaatttagttttgtactgtatgctagaattcaagttttcggtagaacaggtccattatttgatcaatgttatgcagcattaatcaaagctttaaaagatacaaaattaccggatgtatacttaaatgaaagagaaagtagtttaagaactagaacaggtaaaagaaatgctaatgtaaatattcaaacatatgatttagtttgtgatcaagttaaatttagggaattaaaattaagaaatgatagaatatgttgggcaagtacattaggtattgtcaatgttaaagaggaaagtcatgatgaagaaggtgatgctgaaatgtctgaatctaatcatattggaaaaactataatattgagtgatttagaaggtgaagcagaagataatataatgaaaagaataactgcattaagtaatggtaatgatgaatttgctagtattacagttgaaagaggtacaggagaaagactaactaaagatgttattaagaaagcattaaaattatcacaagtaagagctagtgatatgatcaaaaaattatagataaatgaaatgaagttgtatgtaagaatatttcaagaaaagcaggattttattttagtataataataaatgttaaataatagttacatatttttttatacaaacaaaaggtatactttttttccataaatttttataatttttataattttttttttcagatgtacaatagaaacacatatataaagtaaagtaaagtatagcaagataaatgttaaacgaatggaggtatcaataaatgtttactaatcattataattttctttcacttcttgcacttttttcattcttaacacgtcttctagttgttggaatcggagaaccagtatttgaatcataattttgttgtaaagtttgtttatctaataagacatattcattaactttagcagcaacaccacctctaactcttttaacaactttagatttctttgatttctttctgtaaacttcgatatagaaagcaatgaataagactaaataagaagaaataattgcacaacctgaaatagttgcaagtggagtaccagaacaagttaaattatttgtgaattttggattaatatttgacataactttaatatagacagcaaaatagataaaactcaaatcaattaaaaattgaataatttgaaatctagtaacccattctttccaccaaactctaatacctcttgcagctaagaaataataccaatacataacaacatgaacaaataaattgagtgagattggaacccaagaaattggagttgtacccataagttgagtataacataacatagcagttgcaccatgatgataagtatgtaagaaagttaatttcttttgttttaaaacaaggaaaacagtatcaataaattcaacatattttgttaagtaatttaagtaatagagaacaaccattttttgagtccaagcattttcattacaaattgcataaaataaaccattataataaatttgagggataagttgttcaactaatgataagaataatattaatgataaagttgttaaaaataaattatgtaattgaaataaaccatttaaaacgaatggtttaacattgaattttttcattaaagcattaccaccaaagataacagtataatagacaataactgccgggaatacagtataaggacttgataaaaatgtaacaccaggtacaaaattgaattcagacatgatgaatttcccatgtgacaaaaatttgaaaagtgattcaacataagggaaaagttctattccgaagggatgatcaatagaaggaagcggaactgcagacatgtttaggaaagctttcttgtctcaaaagaagagaagcagaagagaagaaatgagttaaggaaagaagagaaaaaaaagataaagaaaagcaactgatataatcaaataaactaaatatcagttctgtcgtatagaaatctatgaaaaacttcaacattcaacattcatgtcaacagtacagaatagtctttaatagtaaacacgagaaaaagaaattaaaaaaagaaaaagaaaaagaaaagcgcgtttcctatgttttcatcaccatgacgtaagcggggcttatcttatttagtcccatcgattataattgtacaattccaacctttaatgccaggtcttatatattacttgacaaaggttcagattaatcaatgcatagtctgtctttggaagcacaatcacgtccaagaactactagtacagcatccgtagtcacaggtgaagctttggatctgatatccgattcaccatcatctcttgtttggcgtcttacatttactgcctctatcttaggtttcctatttggttatgatacaggttatatttcatcagttttagtatcaattggttctgatttaggtaatgctccattaactataaagcaaagtgaatatatatcatctgcaacttcatttggtgccttaattacatcatttttggcaggtttattagttgatttaattggcaggaaatatactgtaataatttgtgatttattattcataattggtgtttcccttcaatttactgctcattcagtatttcaaatgataattggaagattaataatggggtttggtattgggattggatcattagctgctccattatatatttcagaattatcaccagggaaattccgtggtagattagttacaatgaattgcttagcaattactggtggtcaattaattgcttattcaataggtgctataatgagtaattggcataatggctggagatatattgtacttatttctttaattccttgtttaattcaattatggttgattttttcattacctgatactccaagatatcttataatgaaacaaagatatgatcatgcttttaaagttttgaagaaaatatatccattagcatctgattctttattaaatgctaatattgatgagcttcaacttatgaataaagtttggttagatgatgataccctgatttacaaaattaaatcaacttttaatgaattgtttaaaataccttcaaatagaagatctttaattattgcttgtggtttgcaggcaactcaacaatttattggatttaatgcattgatgtatttttcatcatcaattttccaaatggtaggattccaaaattcaacttttgtaagttgctttattgcaggaactaatttcatagtaaccattttggcaatatttattattgattctgttggaaggaggaaaatgttattatattcaatgccagcattatgtttatcacaaatagtttgtgcaatatcgttcaattctgtaaatagttccaatgaagatatttggaaatacatcttattaatcagtttgatgtcatttgttgcattttactcaattggtttaggtaatataccttggcaacaaagtgaacttttcactcaaaaattacgtggtgttggatcatcattatcaactgcaactaactggtttggctcaatgataatttcattttgtttcttatcattaatggaatcaatttctccatctttaacattcttagtttttgcttttaatacattaatatcattcatttttatttatttcacatacccagaactcacaggattacaattagaacaagttcaagatcttttaaaggatggttttaatgttgctgagagcatggctatatatgatgaatatagacaaattcattaactaccttctcattcttcccttttgtaattatagaattcaaagtgtttattttagtaatacattattatagaaattataaaaataaattagttttgaaaaagcgttagtaaatgtatataattagcagttgattaccgtggtattatgtttgataaatcaacatcttgaaaatggttatattttttcttgggaaaacttgaaggtgatgattgaatattattattaaccctataattattcatcaccgcagagtgacccattctaggtgagacattaggtggattagtattcatattattgttattattgttataccgttgagattcataaggatacggtggattattacgttgttgctgctgtggtatttgctgatgttgttgataagtgtttggttgtcccatgtatccatttggattatgatttggatgtgaatttggatatagcatattataagtcctatttttcagagttggtgatttaagatattgtattttttgatttggtgggatcatactatcatttggtggataattattataatatggtctatttggattcattggattatgatggaagtgtgattgctctgtaatatttttatgggaattatgatatggatcaaaatgatgatatttttgctgttgttgttgttgttgttgttgttgttgttgttgctgttgttgagggtgtggatgagcataataataatcaggttgaattggataaggtttagtaacgtttgatgtattagggaaagatgatgaagcaggaggagtgagttcattatagtgactactcacattagggtgaataacacgtctttgatctactggatttggaggtaatggtttatttggagcaggagaatgtttcacactaagcttacgctgaattggaacagatgcagatctcattaatgtggaattatcatcatcaatttgattttgtttattattgatattattatgtgtaacagctgatcgagtatgtgtatgacttacttttctatcgatgttgtaattatgattatgattgtgattatcattaaaattgaaaactaaatcatcatctggcttattagctaaaaggaattcattagtattatcatatccataagaagtatttgatacatttgatgctgaatgcttatgataatttttttttggtgttgataaaaacgattgttgaggagtaacatcatgtaaagtcttaggtgatccaacaggagtaatattgaatgtatttttagttggtgtatgtggtacaaagctgtgtattgtagaattggatattgacgaattcttagaatgagttactcctcgaatattattagttccattgattttattttggtaataattatcatcaataagatgtttttcactattattatctttatgaaaataataatcatcaagtatttcattctcatcttctgtattactatctaatgatgaactatcatcagtatcttgaattaaagaatctaaatgtattgatttgatatcagcacgattggcaactcttgaagcattttgttcaactgtattaatagttttacctaattccaaagcttttttagcagctgatttttcatgattctgtcgtcttgtacttccaagcacagatttcaaagttttaaattttgatgacggtattgaagtattgcttgtattcattgaattatttgatacaaaacttaaatctgaatcaacaaagtttgtattatcaaattcagaattttgagagtcatcccattcttcatctgccagttttaatttatctaataatctaccagttgttgttattgtatcagtggaatacgaacttattaaactatttcttttcggatcattttgatcattattattttctgtattacctttattcttttcagactgtttcttcttttgtttgagtgtctttctttccaattttacaaggggagaaacgactgaaaattttttagccatagaatttgatgttatgtaattcaagataatgaactaaaggtgttgggttgatgtaaaaagatatcaagttatgaaattgtgaaattagacagttaaaagggataatacaaagtgagaggaaatctttattgccgttgttataatatatcaaaataagcaaagtatgcagatcaaaaagagataaacgaagctttggtatatataatattaatcttataatatattaaatcaaggggttcctctgacacgtaaacaaagaaatttttaaaaatagaaaaaacgataatattgcatgcaatttattttttcgattttttgtttcattaattatatggttttataaagagaattaattatgtttatatagtatctaactactggtaggttattttaaagttatctgatggtaatggtctcttctccggtaaaacaattctaccacgagattccatggttctcatttgaataacttctaaaagatttgaaaggattgttaaaactggtgcatcaacacctttctcctgtgcgatatctaatgcagttccaacaattgtcttatattcagtatattgattttttctaatatctataagcattgaaggtggataatattcaccatcatcggatctaatcatcaaatccattatatcttcaggtaattcaactccatcagccttagcaattgcaataacttccttcattgcaggtcttgaaattttatccataccaccaaataattctaatctacctgaatcaacatttgttattgcacaaactgtattaattgcaccattataaactaattttctccatctagtatatttaacatcttcattatattctgctttattcttttcattataatataattcaacaaattttttagcttttgaaatttgtaaatctttatcaattgatgaattaataaatggtccaaatgaaacagtatctggtccaacatgcttaacagttctaccatataatgtactactaatcatagtaacaccagagataacagttgcatcagggaatgctttaaatacagatctttcaataccaataccattttctaataaaacaattgcagtatctttattatatgctttttcaaacattttttcaactggtgaaacatcaggaatattctttgttgtaacaactatgtaatcgaaaacaccaactttagaaacggcttcctctgcattcttaaatacatgatctggtttaaaagatggaattgaaccataatcacaagattcaattgagaatccatcatttgataaaacatcatattgagatctagcaactacactaacttcacaaccatttttttgtaaagtataagcagcaatagaaccaacaccaccaacaccaattaataaaattttacttgccattatttctttatttccttatttctttatatatcaattatttactaaagaagtaattctttatacctctattaaatatatacttcctcagagttatcaactggtctttatataggaaaattggaaaaatgaatatgcagttatcggaataatattttgcgtctctttcctttttgaggaattggcgcctatagtagctagttatacaaatacacagtatttcatcagtatttaaattgaatttgataattctcttcgggtgttggtctcttttctggtagttcaaaacgacccttagcttcacccgtacgtaattgaactaattttaacaaattatctaaaactgttaaagttggaattggcaccccattacgttttgcatatttcacaacattactaataatgacagtattttcaatataattaccatttctaacatcaatcaacattgaaggtggataatagacaccatcttcacctctaatcatttcatcaataacatgatcttcaatttctacaccttcacttttagcaactgcaacaacttctttcattgcaggtctaacaacactctccataccaccaaataaatccattcttccaaaatctaaattagttaatgcacatgttgtattaatacatgtattataaactaatttcctccatcttgttaatttaacattttcctcatattctgcaaaattattatcatttgaatataaactcaggaaatgtttacatctatcatattgcatttgtttatctaaattataattaataaatgcaccaaatttaattatatctcttgcaatatgtttaacagtatcttcatataatgtggtaccaatcaatgaaacaccagataaaataattgcctttggatattttctataaattggaatctcaattccaataccattttcaataagtacaattgtactcgattcatgataacaatcttctaagaaatcaacaactggtgaaatttcaggtatattttttgttgtaataataatgtaatcaaatggtccatatttttcataaccttctttggtagatttaacaacatttgttgcaatataattatcaattataccataactacatgattcaattctatagcctgattttatagtatcataagtttcaggtcttgaaacaacagtaacttccgctctacctaaatgttcaagtgtatatgaaacaatggtaccaacaccaccaaatccaattagcaaaacttgtggttttctttctgacatgtctttttattgtttatttgattctttattctatggaaagaaataataatttaaatgatagaataagttaataaactaaatatattttaaattaaatagggaatggtccccattaaatatcagaaaaaaatggaataagttgattaaagtttttaaaactttaatcaattaaattacaatagacaccgcaatttatcacaaaacattctccctttccaacattttatgacaatcaactacaaatttcatagaaataatcattatcaaaacaatctaatactatttgttatacaggttatatatctccgaagcataaaaactacccgttaataccccaatttaacatgaaaaattatatccagggtaaaatcttataaaaaaattgtttcggctttatatcacctatcactacttcaataagagtaatatacctttacactaacaacttccccgcacttttctttacatagtaacagtttagtcatcagttggaaataggtatctccaatagaacagttaccaactgatacttcagatagagacactaattatactcaacgttttacatttccagtattattcacctatatcaactgatagagtggctcccccgaataaccgataaaggactccgagtgcgaagtattgtgtcaaaattttggttatttataaggtaaaaagaacagccattattggacagtgaatgtatttcgatattgtttgaatattaggatgtctaactatatatgagcgtttattatactggttataaaaaatacttaattaaagtagtttactgtcaatgttttgagtatttccagatgatgctaatgatgaagatgtttgatatgttgttgtagaatttgcagatccacccattaatgacaatgttaaaatcataactaataaatgtaaactcaaacaatatgcaacaaataaccatcttgtaagtggtgtacttaaaacagttttagtaacttgaatgaatattctatcccatggtgtaattttagaattaattctcttagtttccattaatctaaattgttcaattggatgaagatcatgttcataatccaccttatatctactttcaatatctcctccattttgttgaatattttgtgcattttgatgatattgtaaaaaccttatcttttcatataattcacgattatcattcttaagtgaattaatctctctctttaattcaacaattttactaaaatgtttcttattttcttcttcaagttctttatttctatttctgaatctatccctttgttgtgtaattattggtagtagagatgattcactggaatttcctccacctcccattataatagatctattatcatcagttccaccagcaattgaggcagctggtgatatatttctattattattgttatttttaccattatttgttccagcaattgaagaaatcattgacatcgtctcccatttatcatcattattattaccagtatgttcaaaattaattaaatcattctctaatctaacatttgtatcctttaatacacgaatttctttttcaagttgttcaatctttgctgaaaaatcttcaatttttttagatgattcctcattaactctacgtaattgaattaagtcattattaagtttcttatttctctgtacaattgcagattcaatctttgcaacactatctgtttcaaattcattatttgtatcagaattatctgattcatccccaaattgtatttgtttcaataattctaattctttctttatttcttcataatcacttctttcatttttaattttctttaaattgtcaatatcagtatttaattgtgtaatttctttattgaacttatcatttattaatttgatttcatcattcaatttagttgatgtttttctttcatgactcagttttgcaacaagcatggaattttcactctctaaattactaatttgtttatcattttcctttttggtctttttaacctcaatatcaattttagagttcaataaacttgcattctttcttaattcttcatttctactttgtaatgattgaactctttctttggaagattctaaatctttctttaatgattcaactaaactattattcacattatcagttccaaaatcattctttgcaactacattatcttcttccgcatcttcattgtattcttcacctaatgcttctgatttctttttaagtcttaactttaacattttttcattaacttcacgatcttgaatatccttacgtaacgattcaattacggattctaattcctcttcattcttcttccaattgctttctctttcttcaagtaatgatttccactcactatctttagcttcaagttcagcatcgttgattgttttcatttgggtttcagttgtttgaatttgttcttttaatttatcataatctgcaaattttaatagtttctcctctaatattttattctcttctttaactttagttaattcagaaactgtagctaatgtgtctaaactcgattttaataatggttttggatcaggcgcctcagcaattgatctataaactttgaaaaataaattttcaatatttttagttttcttattcattgaatcaataacattttgatatgatttaagtaatgtattaaacttctctaacttctcttcatcttcaagcttcttaaaacttttggtttgattggccaattctttacgatcaactaatgattccttttgataatcttgaatatcaatagccttttcatccaattctttttgtaaattagataaatcaatgattgtccatgagtgcaatgctttctcaaggacaacactactatctaccattttagaattaacttcagtcatattgatttgattgattttgagagagcaacaatggattaaatagtaaaaataatcaacaaaatgcgttttcatcaacacatcaattcaaaaacttaacaagtttcgcttttagtcaatgattgctcctgaattaatatataaaaaataattctatatttttgattctacaatgccaagtgtggtgataattggtggtccgtcaggaaccggaaaatctacaattgctaataggttaactgaaaggttttcgaataatagggtatgttttattgaaggtgatgaattacatagtgtggaaaatatacaaaaaatgagtaataatataccattaaatgatgaagatagatggccctggttattaaaaatttcaacctatgccaatgagcaaataactgaaggttatgaattaatcgtggtgacttgttcaatgctcaaaaaatcatacagagattttttgaaggaacatataaattgcaatgaattgtcattaattatattgttcaatgattataatactatcttgaagcatatggtagcaagaaagggtcacttcttcaaagaaactatgttgaagtcacaattcgattgtttagaactaccaaaagatgaaatcgatgtttctgtaattcaatgcggtagtcactctcccgatgaaatagttgatgatataatatcagtttcttctctttgcattttcaaatccaatatttgaagaattattcataaacgatgcaaaatttcttttctgtgaactagttagatcattcatattaatgttcatattcatacccatattcaaatttggctgtatattgtttaaatttgttttccttttattagaataaatattgttattattattattattgttattatttacaggacctaatatatcattatcacccttatgtattcttcttcttggatatttcatagtagagtttgcaaatatatttgaaacaggtaatggatcttgtttaaaccattcatgactcattgaatctaatgaatttatccttacatttggatcataaatcaacagcttagataagaaatctaaacaatcttcatcaacaccaccattatttgtataccaagcctttaaattagacgggaacatagtaaatctctgcaattgatgatattcaggatatttattcaatgtaggccattcattgactgttggagttcccaaaatttgcattattttcaatagttgattttcttgaaatggcatatgttttttattatccatttttgtctcttcacctttaaataatggtcttaatgataataattccgctaagatacaaccaactgcccacaaatcaactgcaggtgtataatgccttgcacctaataataattcaggtgctctataccaaattgtaacaacaactttatcaccagtataaagagtttgtaattgattattaaatcgtctagctaaacctaaatcaccaattttaatgactccattttgagtaaccataatattagcaggttttaaatcacgatgtaaaacccaattttcatgtagaaatgttaaaccttgtaaaatttggaacattatacttttcaatgataatttattgattggttttatttcaggatgtgaatgataatgaataatttgtaaaagatcatattctgcaaattcaaaaaccatgtaaattgatttattctcaagtatgatctctttcaacgttgaaatattttgatgatttatctctttgcacaaagacatttcacgaattgcactctgtgaaatacctgtataatgcagtacttgattatccttagagtcagatttaaactttttaattgcatatagttgatttaagttagcatgttgtttacctacagctttataaaccttaccataggtacctgctgcaatataacccagaacgtcgtatttctcaattatactcactctacttgcatctttcctttgtcgataaggctccaacgagaaaaagttattgggtgccattcgccctggttgttgaccattccaatactgttgagtagacattgatctctgtttgaaagaaagaacatataacgtgagctaaactgattcatgcttaaatcatgcattaagattaaagtagattactagccacataattgaaatattttgcggctgatgcaattttacattatactaatttgcattaagaagagtataatatagtttttgttttgtcatattaaatattatttacatgagttatacacaatcattcaacagggatcttagtctttggagctttgaatctattaaatgaatttttaagtgctctagatattgatctaatgacaaattgatcaaagaaaggagctaacataattgcacttaaccaaataagtggacctaaaactcttatagttgcatatgcataagcacctgacatttcagcacgatgtttatcaccctgttcactatcccaattaaccaatccattatgcattaattcaatacctttagtaactatattttcaggtaacattggaggtttaatttcatattgatcaaataagtaccacaataaaagaaaaggtataattgaaagaaactgttgtaaaatagctatactaataatgaatggtgcaggtcttaataatattgatctcatatatggtttaagtaacaatggtgtcttttgataatatttattatttgctaatgttttaattttagcaatatcttcaatatcagatgctgtacgtgcatctttaagaacctttctctcttcctccatctctactggtgctttctttaatttagcagatcttttgtatataagggaaagggttggtgatgttgagaatgaacgtaatcctggaaatgcagtgaatttttgagtagcatgactattggatttaaatcctatactggatcttagtattggttgctttaccagtatacgaaacattgtggtatatatagttgttgaaacaaagatttaaggaaaaaacttgtcttatacaaaaaaacagtaaaaatcatgattacttgaaattttagttatgtgtggtcgctgtactttgaagaacataactagtttgaactggacttcattcacaccagttagaggacatacttttcatcatactttaaattcagtcttatattcctttctgtatggattaacctcggtctcttcacttctgttcaatgcgacccattttggttcatctttaaataaacgtaatgccttaacatattttttatcagttaatgtaaaacgatggtaaattcctgctggaagaataagcatatcacctacctctacacgagctctaatccatctatcattaccatcacgcacatcaaaatatccttcaccgtcaaggatatatctaatttcttcatcttcatgaatatgctctgtgaagaatatatctaattttgcattaagtgcagattcaccaccagggaatgaagcactatcaagtgtaatataatctctatttttgtaatgacgttcaactgcaagatcttcaactttttcaggtgtaagatgatcataaaaaacacctaatgaacggagttcctcggctctaaccgctttacctgaatcatgaggtgcagtcattggggttgaatcttcttcgtagtagtatattgcaaccatttgccttgtgtatagtgaatggtaaagaatgaagaagtgttgaatgagtctcttttattctagttattgtttttattttatatgttacaaatccacgtgtagaaacagtggctcaaaagaatgcttacttaatcatttttttatatagtctttaacaaggttgatctacagccaatcaatagtctttttaatcaaattgatcagatttaatcactttgatcgaatgtcttaccatatataagagcatcatcaagttcatccattcccttaagtcttgcacattgtggcacacgtccaataactgtaaatcccaatctatcccacagtttacgacttgcaatattacttgcataaactaaattgaagacacttgatttataacctaattttggtgcccatttaacatattgttgcgccattattttacccactccacgacctcttgctgatgtcattactaaaaatccaccattacagatatgtgatgatctacctgcataatttggtttaatatagaaacttcccattacatcttctcccttaacatccttaggatcagttacatcaccgagtacagcaacgccaataaaatatttacagtaataatcttcgaattctttcgtatttaaagaatcttcaaaagaataagtagtaccctcctcgatgatcacattcattaattcatgcagtgcattaaagacactctctggcatttcatctttactattatagggaactagggacactagagccccgtccgagagattacctttttcaatcttattgatttgcattacccttttaagaaaagagattcactttatgctaaatcgattgtggtagttaaattcaacttttcacgtaataaaactgaaaattatgtaatttactcacatgcaccacaactcagactcaagaactagaggcgctcccgataacagcgtaattacctatttgggaaaacaaacccgttatcttttcatttaattaatatgaaatttactacgacattataatcctttataaattataaacattaacctatgtttgttcacaaagatatcatcacgagacatactatagagagatactcgtccctatttctattaagtaatgacacagtttgatccctctattcatttgataccatatactgactcaacatctaaattagagagatcaataaatcaattacctttattttcaagtaaatgcaaatcatatcttgaacttcatagtgataaaattatacccatattcacattgaaatgtatagaagttatagaaaatgaacttataaattataaacaagagaatccctgtgtttctacattaccatcattcgaatctgcattaagtttattaccatttacatttgatgcattaacacacccttcaaccttatcattgattagtaaatatctcggattttcaatttctccaataatgcattatgaatttgttcattttagtaaaacaaaaaatccaataataattcacgaaaaatcagttgcatacccatttatttgtataattcaattaccaaaagttcaaaagcatttttcatatataccaccaggacatttattcatattaaagggtagagtaattgaaaacatatcatttaaattttccaagagtaccaatgaaaataacaattatatggtattatgtccattctatacaccagataatcaattaaattatgaggacaaagaatcaaaagtgaacactaatagatacattgaaaataaatcatcaataataaatgatgattcattacatactttaaaccattatacttcatggttaaacaattattataccgtttaagtccaaaatacaataaaaaaaagtaaataattgattttaaattattttgcactggttgatactttattagtattattagtatttatatttacccttatattatatttttttagtagtatttataataacttcatcaaaccatttaattcttattggcatttctaaattataaaacggactcttcataacataatctgaatataatctataaatttcattttgtaatgatgaaatttcactttcaattgtatcacttgatgttattaaaataattttcaaatcctgtaacagtttgatgtaagaaaatattaaaagtatcagttttaatacatcttaaaccagttttattagaattcatattaataccacttttattggaattagtttcttcctttgttggtaaatttggtttgaatttggatgcaattgcatgcataccatgtaaatttgatgcaataactaaataatcatttgaattttgttcagtaattggagatccaacagaatctatatctctttggtataatagtgaacctgatctagatatcagatatagtgaatatatttgcatttttgttaataattgaagtttatgattgtatattattcaagaggcttagaaacattgatcttgaccatcagctgtggtgaatctttgttaattttaaggattagaatggtgaaataaaaaccaacatcattaaagcaggggacgatgcgtcgaaggtgtaacagttcaaggcttattctactatatagtggtttatccgtaaccttaataatattcttatctatatggtgtaagagaaggagaacaattactagttctagaactgtaagtgcacatgtgtgtatctaatagatattactcttgtgataccagcatatagctgatatagtttataagatatactattaaacccactgtaaaatcaattttattaaggggagatatcggaaatatcgatattctcggaaagaaaccaaacgagtgattacaaattttcagacccttactgattgatgtagtctaagttattcatcttataaatataagccttcattcccattaataacttagtagttaagtgtttcaagtagaattaattaatacagaataaattgttggttctattaaacaaatcaaatgttatccgttgcaccaaagtcaaatgtattattaaatccaagaatgaaaactataacgccaattcaatcagatattaatgataaacctataaagaaaattgttatgtcaaaggaatgggttttaccaccaagaccaaaacctggacgtaaaccatgtgaagatattccaagttctaagagaaaggcacaaaatcgtgcagctcaacgtgcatttagagaacgtagagctaatagagttagtgaattagaagagaaaataatgggtattgaaagagagagatcaattaatgatggtattttaaaggataagattaaaaatttacaaagagaaaatgaaattttaatgatggaaaataaaagaattaaaagtgaaaatgctagattattaacacaaatgaataatagtaaaaataatgagaatgataaaaaacaaaactcaatcacatttgattcattatttaacttagtaccacaagctgctgttccattaagaaaacgtaaatcaagtgaaaaaagtgtttccccaactgatgaaattgattttactaattcatttacagttaagaagcaaagaaaaatgccaatattaaatgatgttttcaaaagtaatagtaataataatagtaacttatctatatcatcaatgaactctttcagtaagaaaaatgaatcaatgataacattaaatagtttatcaagtttgagtcataataacagtagttcatccattgatacagcaaatattaataatataaataataccaataccaccattaccaacacaactactataaataataataacaataataatataccatttgaaagttgtggattttgttcagatgatacaccatgtgtatgtagggaaattgaaactgaacatcaattattacaacaaagggaaattcgtaaaatacaggaaaacaaaaaggcagataaggaaagagaacaagaggaaaatcagaagaaacgggaaagaaagaaatcattaatggatttagagattgagaaaaaggaaaaagaattaattatggaacttacaaagaatattaagaatgaagatttaagtcaaataattgaatgtaatggagatcccggtacttgtttacaatgtaagagtgatccattatcaacacaattctgtaaaacaattgcagaaaaatctaataatattaataaaggcacaaataaagatattagtactattcaattgccaagtatcgataagaatagtatactaaatagaaattcattaccatcattaactagtttaaaacttgatgaaccaggtaaaacgtttataccatgtgctgatgcttataagacaatatctaatcatttaagtatacgtaatgttggtattaataacatcacaaataatttacaaacccgaggtatgtttgttgaagtaggtagtgttgtgtcatgtttaagggaattagacagaaactttactaatagtaaataatgacataaaagatagtgcatataaagattagagataaagatttttttttaattttatagaaaacgaatatttgtaataaagttgttaatcttttatcagaatatcatccacctaagaccaaaaaattcttggtttttaataactgtaaatacagtgattaattatacataatgtaatgaaactagttatttgtgctagagttttggcgattacttgaattacatatatatattgaggacttagtactgtctaatactacattcttacacatgtgctttaatggaaaagtgatgttaatccctcaactttgtaaagttacatagattactaaacggtatatattatatacaccgtacttgcccaaattgttacgatctcattgattttcattgtgatgagatgagataagatgagatgagatgtggaatgaatataatagaaattgatattaactttacaaaataagtagggtacggtggtaaatctacattgaaaagaacatgacatcacttactattctatgaataacaacaaacccttcctcgtattaaataataattaaagtttgtgtcgtataaaataatatatgcgacatttatgaaactaggggatatataaccgaaatcttattctattcgataataatcactattatgagtgggatttaacttttttgaggaaaagttaccgcccaccttcccgtttgggaacttattatctccgttaagaaatctttggaaatgttacatggggtgatgcaatcaatgcgaagggaaacgtctcttgcatttactgggtaatttacttatattttaataataataattaaaataaattaatattaactcttaaatgttttcattcatttaaatccatttattatctatactttcccgttttttttgaaagtcttaaattctaatttatattttatttaacttttatcacccttaatctcatctacatcctcatcttttgtttcagtttcaagttttttgcttccctttactctttctttattattttaaggctctaatctctaatcttctttttttacccttcttcaccacacccgatcttcattttctgcctctcctgcttctccaaaaaaaaaaaaaaaaaaaaaatctattcctacttatttataatacatattcataatgggaagaacaaaactcgaaaaaatatttccaacttataatggttacattgcaaattctaatgatgctttaattgtattacaagctgttttaaatggtgttttaaaacctgttagtagaagaccaaatgagagtgaacgttctgaattaattaaatctggtaatgttttcgtatttatagaggaaacttccggtattaaacgttggactgatggtacaagttggtcaccatcaagaatacttgctagatttttaatttacagagaattatctaaaaactcttcttcaaattctgctacaaatctaaaacaaaaagattcgaaaaatccaagagattctaaaaattcaatttccaaaactcaattaagcgaaattgtaaattcaaacggtaacggagataaaaataataataataataataataataatgttgacaataatagcaataatgaaatcaataaattgaatccaagaactattacagctcatgcattggcaggaggtgatgcaattgttaatagtattaccaagaaaagatcaagatcaaaatcaaatggttcgataagttcagacatttcaaatttttcttcaataccatcaccaaaatcttcaattacaaatattacaacatcaacaacaaatacatcaatatcatcatcttcttcatcaacattagatgataatatttatagatctgatggcttaattaaaaaatcaatgtcattatgtttattcccaaatactcaatttagaaaaactattcatttagtttcgtattatagagcaaatgatgttttaaataatttacttaataacccaacaaatgatcaattattgaaaaatgttgaattatcatttgaattattagaatctttaagaaatacaagtttaggtaatatgttatcaactagaggttcatcagaatcttttgaaagccatggattttgtgaaaatgatggatttgatgaaaaagttttaattaatttttcaaaacaatataatgaaaaatattcaataattagtaagagaagacaattaaattccctttatcaatatcaaccacaatatccacctcaacatcatcaatatcctttccaaaatcaatatcaaccacaatatcaattaccacctcatcaattaacacattcacaatctgatcatgaaataaattatcattcacaatttgcaaattataatcatcatcatcattcttatgataattcagcaattcctattaaatatgaagataataaaattccacttataccttcaatgtcatatccattaccttcatacaataataaaattccaaataataatttaaataattttaacattaatttttcacataacccacaatcatataataataatattccatcatatattccaaattatgataataatttgtcaaataataatagttataattctaaaatgaattttcaaacatcaatttcatcaattgattctaatctgaacagtaatatgaataataatgttagtaataacggttctaacaatgaaattatcaacaacgaaacaatttttaataataataataatagtaatagcaatattgataatacaaacgttgctaccacttctgctactactgatgctgttgttactactaccactgctgcttctactacggataataagaatgatagtatcattaatgatggagataaaaatgaagttactacaggtagtactaatttaagtaaaattccttcaattttttcacaaggaaataattctccaataatttatggatacaataacaatacaaatagtaacagtggtaaaattaatttacaaagtacaactccaataccaaaacaattatcaccaccaaataatttccataatagagtttcatcatcaaacgctacacaatttggatatccaccaactacacaatattcaccagtttcatatcaacaaccattatttgattatcaaacaattccaacacaattaccattacaaaccaattcaccaaattctaataatccattaattcaattagttagaacaccatttagtaataattcaagatctaataccccaaatacaattcaaaatttgaatccaaatcaaaatcaaagaatttattcattacaatatgttacttctactacaccaatttcttataataataatatgattaataataatatcatcaatatcaacaaattagatacaattaataaaagcaaaactccaatcagtgttaaaattgagaatgatgatactcctgataagaataacaataatactagtaacgcgggtagcgctaataatttaaatgaagaaaatattagtgttaaaattgagagcgaatcaaatgtcgtgaatggaaatgagacttatagatcagtctattccagtgtataattctgtataaaaaaatagtaataagtcaataaataaattaatcttagtaaagtaaagtgcacgatgtcgatccttacataatgataagccgctataattattaataagtgtaaattttcgtctaatttccatacattataattgtgggatataaattatgggacttaatcattagtactaatttaatattcggatattacaattccccaaataggcaattagtgaggggagattaagcgaaattgtggaaggatcggcctttttgctaattttagtaaataatttttttaaccttttcacccaacaataaaggcaactgctagtttaatgagatgggctgttcttcaatttaatattttaggtacaaggtatagagtctcaatttataaaaaggtacaactgtattaaaatattgattctgtcgatatatagctactctatatactaaaaagtaatattatttttttgtgttacatgcccgatatatcactttacacactgtttacttaaatctgagattctagcaaataaattgtttaaaaaagggtaatattgacacaatttctggtgtaacatcgataattccgtattactattttgaataatttattgactctggaatagcggttaaattaaatttatagcagttactacttaattgtggcacaatcttttcaacaatagaatgctttcccacggagataattaaaattgcttaaaatcggaaatatttccgaaaaatagttgctgacgtaatctgcaaaatatcttatatagacgcgactgtatcttaaaactttttactgtcgcgactatggggtgtacaactttttttaaaaattttaaaaacttccttccctccccccatgtttgattgaaatactcccctcttaacacagtttttctcaccacattacatcaacattttcattaaaatttaactatctcaaacattatttccatttccgataatcggtattaaggctttaacctatattttatcaattcaatttctttcattaactcttattatataccattcatagacaattgaatatcaattgtactttacttaaattcaattagtattgtatccgttttataccggatattaaaacaaaacataaactcgatttaactcaaaataaattaaattaaattaatctttactaatcataatatcaatagtcaaaatctgcctcagtatcagaaacaactgtaatatctgtaacatacttacaaaatgacaattgacaaaaaccaagataccaataatcaaaatcataatcaaaatcataattatagttatgaccatgatcataatctagaagaatctgaacaacctaaaacacatcaaatatcatatgatatatcagttcatgcagtacccgttagtgaaccaatctcaacccatacacaagatttattatctttcaggttaagaatgagtcagaatgaaataacttcagcttctggtgcattagctggttttttatcaggtttagtagtgtgtccattagatgttgctaaaacaagatttcaagctcaaggggcttatttacgagataataatagtaatatcaattcaacaaataatattagtccaaaatataaaggtgcatttcaatcaatgaatttaatttggaaagaagaaggtataagaggtttatatagaggtatagtaccaattacactgggttattttccaacttggatgatatattttacttgttatgaacattttaaaaaaatgtattcaaatttaatagttgatgaaaatttaagttattttgcaagtgcaatatcttctggtgcaatttcatcaactgtaacaaatccaatttgggttgttaaaactagattaatgcttcaaatggataatggtaaaaatatttatgatagtttttcaacagctaataataataccaccaccaccaatactactgctaataatacaaaaataaaaagagattggtataaaggtacaattgatgcttttattaaaatgtataaaaatgaaggtataggagttttctataaaggtttattaccatcatattttggtttatgtcatgttgcaattcaattcccactttatgaaaattttaaaaaattatttaaattaaataataatgaaaagtcaccaatgaatgaaacttcagtaactgaaaaggcagttgattttgttaaatttatattggcatcatcattatcaaaaatgattgcaagtggtataacttaccctcatgaacttgtaagaactagattacaattattttcaaatagtaatgaaattttaaaagaatctcaattaagtggtttaattagagttataaaaacgattatcaaaaatgaaggatttttgggattttatagtggatttgtcatcaatttagctagaacggtacctgcaagtgctgttacaatggtttcattcgaatattttagagaatatttccaacgatttagttattgattttgatctaagaaaatatttatcttattattattattacctttactattacaattatatctataatttataaatcttataattcgtctgtctacttatctatgatctgtctatttatgtgtatatacaaaaatttcaaatgtaattgcaaagaaacgatatatatatcaaatttgagataaacacgctccttcatctgaaatttttaaccatgatccacccggaagtaaaatgtgcatgattatttttagtagtatatatatctatcgaccttctttaactagaccaaaacacacaacaatgaaattaacatcacatttgtcattgttatgctggttagtcacatcagtaatagcatctgatggcaccaatgaaaatgataaagaaattgatgtagaattattacattcgcaagttcccgaacctttaacaattaataattttgatgaaacacttaaagaaggttttaatatggttgaattcttttcaccttattgtccacattgtgttaatttatttccaacatgggcaaatttttatctaaataatgagaagttgactaatgataataaaaaatataatatctatcaagttgattgtgttatgagtggtgatttatgtgagagagaaggaatacattattatccaatgataagattttatggacctgattcaagattattagcttcaatgacagattctgttagaactatagatacattaactgaatttgctgatgatcaattattaacatggaatgaagattttattgaaactgatgatacttctttaaaaattcaacaagtttatagttcaaatagattattagataatagtgaactaatgagaattatcgaaggtgaaaaccaagttccttatttgattactttttggccaacaacttttgaccagcttaatgataaaaatttccaaaataaagtttcacaacatgttatgtttaaacattttgaaagtttattcgaatttagaagtattttaaatttaacaataaagaagatgaaaaaattcattaaagatgataatttaagatttggttattttaattgtgcatctagtaaagaaatttgtaaagaattaggtctttccaatttaattacaggttctattaaagataatacttatccaaaggctattctttatttacctaaagatacaggaggcaatgcaattaagtttaatgctaatattggttcttataaaggtataaatttagctgctaaatctttgagtaattggattgaatctacattaatcaattctgaattgagagatatgaaatttaatgaaatcaaaaattttattggaggaacagttaagttagagcaaaaaggtagaatttcagaatttacagattattctaaagttgcaattattcaagttaatgatccaactactaaatcttatgaagatgacattattctagaacacttaattcaacccattgcaaatttaaataatgatgttttcctttttaaaacaactgataatgaaatcgttgaaagatttttacttcaacaagagaaaaatttagcaaattcttatattcacccaggtggtaaaattgatgaaagtattgaagataatgaattacagtttaatgaaaaaatgtatatttcaagaacacatacttcatatccatattatatatgcttgaaagcaggtacattatacacgcctgttctgcaaacctatggatcagaagattccagaagtgttaataaagtggtggaatttataaagaagaactacttacctgcagttactcatctcacattagaaactgagaagacattattccctaatacttttgataagatgtttaacgataaaaacgaaaaggttatcattgcattaactgatttccaaccaaaacaattttttgatgttgagtactttttatcatacgtttatcataaattcacattcttaaataatcataaccttttcgataaattagaagaaaaaagagcaactaaacatgaaaaagttgctaaaatgaaaaagaaggatgcaagttcagatgatattattgatgcattaagagagaaaattgatataaatttttcatcaattgaaaataatgttcatgcagcatatattgatatcaaaaattggaaatcaattgtgaaacatatgaattggaccaacatcaagatcagtgattatggtgtaggtgatgttttaatagttgaaagatttggtggtcgttattgggaccatgatgtttcaggtaataaaattagaattgataatgaagaacaatgtttaaaatcactagaggctgcaactttcaagaatttgaaaagtaaaaatttaaaggatgcatcatttttcacgtttcttctctattacggagcagctttagttttattcttagttggattccgttattataaacaatggagtcaatctaaaaaacattataatgaaaagatgaaaggactcggtttattaggtcttacacccgaatttgaagaatctaaatttgattagagtattatgagatactctactgtataatataagtaatatataatatttaatatctactgtatatatctgaccgttgatatcatcagaactttaagatatacatcgatgcatgtacaagaattgaatattgtgttacgtaatatttttgaaaacatgaacatgtttttttctaagaaaagaataaaactagttacatttaaatttcatttaaattttttctttcacgtttttcacaactcttaaaaacatcaaaacagcaatagatgttcttggggtataagatttcttcaaggatacgctctgtgaatattagctcagtggtaacgtatcgatgttttgctactgtaacaaacaaaaaatatgaaaatgtcattttcaatagtcaagtcaaagaagcaatcaaaaaatccttcggaaatttcaaaaataacttgaaaactaattatatatccaattttaaatcagaattaatcaaaaaacaatataatatagactttttgaagaaaaatatgaatttactaataaggagaacgaatgagattgaaactgaagttttaaacaactccaatgaacatttagaaattaatgttttaaaaaaatcttcacctcaaattttacctaaaatgattgttccatcaactaaatcaatttgtaaatcagttgcatatttaatcagtgataaatcacacgttgattttgttccactgactatcagatcagaatttcaaatccaaagatgataaattaaattatatcattgatttacttgttgaaaaactattatatttacgttttaagccatattatctacaagacatgtacaatgatagtagtaataatcaaaattataatcaaaatttaactttgaatattatggatatcgacaatccttatgagtggttcccacaagcaagaaaactaaaacgtaaaattattatgcatgttggtccaactaatagtggaaaaacgtataatgcattgaaaagattagaaagctgtgcaaagggttattttgcaggtcccttaagattacttgcacgtgaagtgtatgataaatttcagaaaaagggtgttagatgtaatttagttacaggtgaagaagttattgttgatattgatgaaaatggtaatagagcaggtttaacatcaggtacaattgaaatgttatcattaagtgatgcatatgatgttgttgtggttgatgaaattcaaatgattggtgatccatttcgtggttccgcttggactaatgcaattttaggtgcaaaggcaaaggaaattcatttatgtggtgaaaaaagtgcaattccattaattcaaagtatggtgcaaatgacaggtgatgatcttataataaatgaatataatagacttggaaaattaattgttgatgatcaaccagtttcaattcatgatttgaaaaggggtgattgtattgtttgttttagtaaacctgttattcttgatatgaaatcacatgttgaaaaagaaacgggtcttaaatgtgcagtcatttatggtgctttacctccagaaactagagcacaagaagctcaacgatttaatgatggtgaatatgatgttgtcgttgcttcggatgcaattggtatgggtcttaatttgaaaatcaatagagttatttttacaactactcaaaaatatgatggtaaggcaaatgtcacactttctgactcaaacattaaacaaattggtggtcgtgctggtagatttggcgttggtgagggtgaaggacacattactgctattgctaaagaagagttaaatgttgttaggaaagctattgaagcaccctattacatatttgaagaaagcgacattatggccacctgatggactgtgggttagatattattccatgttccctgataacataaacttactttcaatttatcgtaagtttgaaaatgatatttctaaacattatagaaaaacaaaggatgttgaaagacaatttttgcttcaatcattagatgacagaaaaacggttgcaagattctttgaagctcagaaacttaccgataatttctacattcaagatcaactaagatgtattgcgtgtccaactacaatcactggtgcaccaatgagggcacttagattgattactgatgatctctttgcccaatttatgaaaacaatcattacaagaagtagaaagtccatttttgattttgattcaatgcctttttatgttactgctggtgacgatgttgctgaccaggaaatactcaaaaaccaaaaagtaaatacaaagggtggcgacatcgagatagaaccagttccttcctcaattaaacaagatattatagaaaaaattcaaaagaaagaaatcaaagaatttgaaactttaagaacaccaattaataaaatgatacctgctgaagaaagattaatgaagttagaacagtttcatagacttatgggtacttatatgtggcttgcttatagatttccacaatcatttactgacatccaatctgcgaataagttaagagaattgattgaatatagaatatcacaaactttgaaaaacttaagagcttctaataaattgaataaaggtagatttaaaacattctaagctttttaaccctgtatataatagtaatacttgatatagaaatatttttataaaataaaattatattatccagctatccacttctgtgtctccagattttatcaaaggttcatcaatctcgttaattttactttctgagcataaacaacatgatgtagataataattcatctatttgttcttttgcattagcatcaattttatgattatggtcctttgatgttatttttttctggagcttgtaaatagcatttctcatcttataattgcttgagttaagtatgtacttggctaaacaatcttggtggaaaagcatgtgtacatgggaaaatgatgaattttctaataataagaattttgtggcatatttcacaagagtcagaaggtgtcacaaattgataactttttgcctcaaattctgctattttggaattgatattctctaatttttccagtgttttctccatttcaattgatagtttgttcatattatttgctaaaacttcaagaaattcgactaaaaagtctttaaagttatcaataacagtaaattctgggaataatggtagtaaatccttgatagtcaaatttccacatttgtttgttaaaaattgtaacaactgatatatttgattgttttcacttgtttcaacatttgctacttctgattgttctccctcaagctcaaacatatcagggttttgcttaatgtagttaggactcgccaaaatcttgttaataagttttccacttatatctaaccataatttttttcttcttgattcatcgacagtgataagtttatctgctaccataattgcgttatctatcaaatcgttctgaagggcaagatcgacggcttcttcgtatttttcagtcattgaatataagaatatagcagactttattttattggatttatagcatagtctcaaaataaaatcgtaatcaaatgaaatatcagaaatagagaatttggaaaaagagctagtttttattaattggtattgttctaaataaagcaaaattgaatcctcatctgctaagttaggataagtgataagtgtagagaaaaacaaattttgtatcaatctattttgaacgtatttctcataaattagaaacttcaaaaatctaatagcttggttgttctctggttggatattttgaggaattgctattatcttattgtaagttattagtgctggcatcaatttgattggatctatatcatcaattaatctcatccacgcatcaactacttttacaggacaatttatgagcaatactgttgcagaattgtaaattaagtaatctttttgttgagctgataaagttgataatgcatcttcccatttctgatgtgttagaaaatacttgataacaaattcatgatcacccattaattttgcaaaatacaacagatcttcacttctattatgtgatatgattatttgatgaactgtggcagtatcaaacaatttcaaattttccttcataaaagtgtgaaactccaaagttaaaccatctatggcagaatttttctttgtattaataattgatgagctggataatgcatctacaacagacttggtgacatcacctgtatttacaaaactgttttctagtgagttcaactcctccacataggattccacgatccaacaagagagtaattttttttgtgcaacttctgtcttagatagctgatttaatttcttctgaaggtaatagcgtaatagtgatttgtcggaaagttcaaataaaagcaatgcaactttatcaaaagattcatcagtttttaaaaatgtgtcgatagattccttgtaatttttgttttccatcaaataatatgattttttcttcagaatttgatttatttgaggattctcatcactcagattttcaagtgcctcatcaaatttgtttatactgactaaagaatttatgattcctgtattttcagtatcaatcaaaatttcgtatattttcaaatcagagtgaagccaataagttttcgatttttgatcataagataatccaatgatatttgtattgaatgtcgtcaacggtatacttgccaaataagagtaatttaactgattatacacttccagggtatttctcgcagttaaaactaaaatgaaataacctgttatgagaaatgactttatcttttgcgtaacgttaatttctgaaataatagaaaggttgttttccgtaatatttttatctttcaaacatattttagaatcacttctcacagctaacatagtttgcattttgtgagacttctgtgatatgtacaggtgattccagaggtatgagaatagcttttgctatactttgaaaaacagaaatatttggtgatggattggatggaatttttgtggttaaacttataatttgattatcacttgtcacaaaatcaatcacatactttaagatcatgttctcatttgataataattgattcactacgctgactactgaatagttatttttcataactgttttgactaatgtttccttacatgaactgatggaatattccagcaccaatgaattcgacgtggtgactagtattggtccagtgtaattctcagtgactacttcatcaaaaaataagatacttgtgatatttaagtttttaagtttgggtagattatgatactttgattgtttgtaattgatatagaaatattcgttttttgaacttttcagtattaaatgatatcgtttgtaatcaatccagccatttgttatagttgagtccttactcattttaatttttatactattaacattctcaggagagtccaagtcaattctgtataatactccatttgtcaatattaaatgcacaaaattgtatacgacaaaaagtttgcatatttttgaattgagggagaattgaagttgaacctcttcaatttgaaaagaagaagcactggatgagttagcttccactgtatccatcattcctattatcactatagactatatatgacacagcactaaacaatttgtataaattaaaagaaagaacaaaaacgatgttgatgatgatttattatgcaccttccgcaacatgattttcaaataatttaatgatcttcttttttctttcttcatcttcttcttctgctactttctggtttttagtacagataaacacatatgggatcaagtatacctcttaaacttttagtggaagcacaaggtcacaatgtttccttagaactcacaaatggtgtatcatacagaggaaaattagttgaagctgaagacaacatgaacgttcaactggaaaatgtggtaatagtggccaaagatggatctgttaaaaatgcatcacatgtatatattagaggatcacagatacagttcttttcaatacctgaaattttatcaaatgcaccaatactacaaagatccgctaataaatagacatttttatctctattgttcgaaatacttaactatgtactataaaaacccgttataattaaaagaaaactagatctaatcttttagatgaaaaaatcaagttaaacacccgtgtagaagaacatatcttatcaaactaaaaagaagtatccttgttactatgcatagtttggtataaatgatagtttagtaatatacaaaaagaaacaccaccaagtttataaaaggtaaaaagctataaaatgtaatatttgtaaagaataaagagcattaatcaaaaccttccaaaacattcaacactctctccagtctagcgcaactttggtcatatctagctggattaagcatcatatttgcagtaagtctactaatagagtcaactattctttctatcaaaaatttttcttctgctggtatattcaaagttgcaaattcttgtcctaatataattccatctgtagcgttcagtaatttagccaaagtttcgtatgaaaagggcttaattttgcccttagatgatgttgatcttcttttggatttgtgtgaacttgaacttttcgttttgtatgatcctgaacttcttccttgaggggtatgttgacttgggttactattggatgatgcagtttttgtatgagttttcaaactttctgtactcatatttctttccatgttaataatatcattatcaattttatcttcatctctactgcttccccgtaaatgtaaaggtggttcttttaattttattgtggatgctgctgacggatcaagtgtcattaatctggattttctaggtggaattgcaatatcaagatctaggtttctagttgaatcatcatcacctgtttcatatgcattttcatcttttccagcttcaaaatcttcaaagttagcatcctgatggctagaaatggacgcattcgcagtatgaaaagagctcgatgcggtgactaatgagttggacgtagatgttaaagacatggattttgattcaggtgcttgcttagcttttgaaattagcttcttctcaatttcatcgtcttcctctccaccaaattctaaagttaagtgctcaacttctttcattatattgtccaatttgctgttcacacgagagctcgtagagctgttgcttgaagtcgatcttctacgtgatttatttttcagtggtgacgaattgattgatgggtttatcatacttgacgtaccagtttcgttcagttttggtaatggggatttgggtggtgatgatataagatgttttttcactggtgaattttcactatttgatttcagaatctttgccatatttacactatcaaccgattgtaaacgcttcagacctcccttctgttcttttgttgaatccatggatacaatactgttgtttctactgtgacttggagagtgtagtactaaaagttcgtctgatgaagagcttaatccactcaattgtgataactgtaaactttccttattaccaacgtatttaattgtatcaatatcaacatgttggataatacctgagtattctgaaagcattgaagcacggttagctgttgtatttctgtataaacccatactggtgttacctaaacttgaaacagaaggtttacgaggagcagtagttgatcctttagaactatttttgtttgtagatacggagtttgagttggacaatgaagcagaatttattgttgaatgattagaattttgaaatgaagttgatttaggaatacttaaatttttggaattagtttgtgattcagtgttagatcctgatcctgatcctgaatttgaattttctcccgaatcactagatgaatgatcaagatgtgatcttccaggtggtggaagatatatattatctgattggccagttgtatttccagaagagtttccagaagatggattctttaaagtatcattatctgacatttttattgatgttggttttgtttcttcagtacgactgaaactgatatttcttatgacaccttgtttctccgcacccatttcaagtagaatatgtgtgtaatttatagaacctttttcttaattaactaaccaaaaattgcaaaaattcgactaacaaggtttacagacgatcaaaagaaagggacactagatcaatttctgaatggatcaaggaactaatgggtataagtgattattgttaaaacaaatttccaggtgtgggtggctggttattacattacccaattaggtaattgtgatatcaaaaaaatggaaaatcagtgctatttttaattttcgattatattttaaataaacgaggtagctgaacttaaaatgtttggttacaagtataatataaaatgttacataaattgctaaattgatggctggtttgccagttccaaatatgaagcattattattctcctagttgggtaatatcatcttctgtagctattaaacccatagcattcaagaataagttcaaattgttcatgtatcttgaagccttttcaaagtcaccgctagccttgtattctttacatgcagccataactccaaaaatctcacctctaatttcatcaacaataactctttggtgattcaatttacctgttaatgttaatgaagctaagaattgccagatataagaatcatcttcatcagattgctcatttgtgactttaattgattcatcatgtgatagatatggtgggaaacagtatactaatctaccttctaatgattcaaacatttcattgtaaatagtttgccattgagaaagttcatgggcactgagtttttcagatatttcttgtttaattaattcaagtcttgaaattaaaactgtaataattgataaaccaattttggttgttgataagaataatgttgtcttgttatctaccagtgatttaaaccatgataaaactttggaaaaacttgcttcactaatgtatataaccaaattgttcaaaactgtaacttgaaataagtcaatctttttaatgatatctttaggaatcaaatagttagagtcgacataattcttgtatgatccagtttctgataacatcaatattttgtaactgttcaaaaaatagaccaactaaagtttccttttgagtttcggttaataaatggaacattctaccaaaaaccttcatcattttgtcaaaggctaatatagatataaatggattaacaacttcattagaagaagttttgataacatccttaatatgtaaagatttccataattcaatggtttcatattgttcattttctctttctaaagactctaacttcaaaacctcattgtatattttttcaataattgacaactgaaatgttcttgcagactttgagaaagagtattctttaggaataacaacctcacttaattcaaccggtgcatctggtgcatctggtgcatcagcttcgttagaattttcgttcgtactttcagttggaataatcaattgttttcttggttgcttacctgaaccataactgactttacctaacgcacctgccttagttaaaataccagtatttgcacccctttcttttgcaacagaaacagcttttgaaacttgttgttgcattctttgtaatgcaacatctgctctcttagatctaccaccaagtctgtgacctgattgttctaaatatttttgagctaaagaattcatgttattgttattgttggagtttatagctttagtaaacttgactgtaaaaatcttcattatatggatcgtcagtaacaatttgagataattgaaatcttgtaacgaaatctttatcttttggagtcataaaaccggaacatctggtgatagttgatacttttctttgtctaatcaaaaagttttcacgttcttctggtgacatttgattcaattgatcttgtaattgatgttgtctttgaaagttgtgatgatcattgtggccaccataacgatgcgtttggcttctttgattgtttccttggttatatccatgtgaacggtagtgttgattttgatgatttcttctaccattgtgcatgttatcactgaagtcattgaataatacttgaatcatctgagtcctcattactgaaaagctggttcagaatggttaacatgaccattactcttagcgcttgcaacttcaatagatggaaaatcgttcatgtctatggttttatctgcttgtcttatttggagattggactgatgtgtggggctgctcaacttgctgaccttgagataatggttgagtttgtggttgaggttgtgaatggggtggcacttgttgttgcgcttgttgttgcgcttgttgttgaaattgtatttgattttgagtttgtggttgaggttgggattgtgattgctgtggaatgttttgagggatcatttgattcatatttggattcatgattccattttgagcagaaaattgtggatgcatttgcatcataggatttggtgttgataataacatttggatcattgcttgtgttgcagtttgtaagtttgggaatcttcctgatgagacagcactatagatttgttgttgaattgaaggttgatataacatttgagtaatgtaaggtggaagttgaaactgtggattaacttgcatattcatgttcatattcatattcatattaacgttattaggtggttgaccttgccccatattcatattctgttgttgcatatgagctaatggagcttgaccttgaccttgaccttgtaaattttgagactttaactttgcttcaatctcttgtaatgaaggaactgatgaagttccttcgttagttttattgacattagatgattcgtccatccataatgaagccattggttttaacatactatcgatatttgaatgggcagctgctgcgtatgaaacatttgttttttctggaattggtgctggtttcaatgatgatttcttagagttcactccaccattagagaaatcaaaatcttgatttaaattagaaacagcagcagaaccgaatgtatcttcattaaaagcatcatcatcttcaagatcgttaaaatcaaccgtttctggtttgcctttcggagcagccatagggtcaaatccaaagaaagacatttggttgttttttatattgcaatgactaagtagttatacttcaaagacaatttcaaagcaaacgcagatcaaggtagcacacatccacccaccacaacttcaagttgaaaatggccaccaagttttccatgtagcgaaactttcaaatgcacagaattctgtcatttttctgtgcgtgcaccttttatttatgattaatgtgcatgcatggagtctgttgatgatgtatagacaatcaattggtggtgaactgtaatgtaatagaagtggatcttaaacactataaggatataaatagtttagtatatatgataagaaaaattatgtaagagaataaaaaatgggaacgtcagatgtattatctgacttcaaatcttctacctgaagcagtctttctttcagaacgaagttcagcctcatcaacctctctcttggctctattcaagatcttggtgaaactctgtactctgtatctcattctttgatgtaagtaacattttacaattttaatatgataatggaaataacttctgaacatttgaatgtgtgtgatagtgttccattttgcatcctctgtatttaaatgtcttgggaataaaacaaatgtgatgtaagttttatctcctgtaggtttttcaatgtgttgaatttctagtggaacatccttatgagaattgataacttgtggtgccttttgaatagatctttttctagcatcactgaattcttgaaggaaaattttagagaaaatcttatcagtttcatcgttgaaaacagttgagaatataactgtaactctatcattggatggtttaatgaaaatactttcttctccacgataatctaattttaaaacttcttcgttattattagttgcagctacactatcttcaccataaatgttgtttggatcagctggattttctcttgatagcacttcatatctcttaaatgcctttaagaatggagctgcaaaacaatttctcttaagtaaactcaattggcacacaagttcagccttttcgatatcatttaaagtacaattgtttatatcaatgtataatgaaacatcgtaacctggctcacatgatccttcacttaaaatttgtataaatgagtaatggccatacttttcctttaacaattccaatgacccatatttagctaaatctgaccaacatttaataccaatcgataacaatatcttacctttatcttcgggagtggagatacgatatgttgtaaaatcaaaatcagttaatattctatctaaacttggaaactcatacttaggtgacaatgctgatgcaaatgtttcctcaatgagtaaattttgtggttctagttgtaacatttgggtattgtattaactataaattgataaagactttgaaaatatgaacctttaaagaaggtatattagttgtgttgagaatccaatttgcctcggttactctgcgcataacaaaaaactgtcttttgcgaaatgcagcttttccctacacaaaatttctacaatcaccttatttggtctactttttgagaggattattatcatcaattttcaatgtggaatttgtattgaaagttttgtaaataacggaaaataaatgtatatatttaataatgtatagtttgtaaaaaaataggctggaaagagaaataaaaaaatataacaaaataagacaaaaccaaacaaataaaatcgataaattagaaaaaataaaatgaaataaagtaacgtacactaagtattaaatgctggtaaaagggaataatatatggaaataagattatgaataaaattcattctaactgtttcttggtctctggtttgactattaaatctttaagaatcatatcataaatttccgacagtttgttgttatccttgtcaggggatggtgaatatgtaatttcgtgttctgaagcttggctatcaattgatacatcatcattatcatccaaacaagaatctatattagatgctacttctaagttagatcgagagcttgagggtgaatcagaatatttcttcacaaataaagtcatttatttcaacgttattatacttgcaatatttcaacattcttatcaaatcgtatggatccttagttgtaagaattgcctttttcaatgattctgctttttcgggatttttcttcaagtccttgataatgtcatttaatgagtttgtagttgaactttcaaatgaattttttaagtattcatcatattgagaaagatttaaaacggaatctgtacactttttagttgagttcaatttattattattgattaattcaatagctttatcaaaagacttatcaatagaaaacagacgaattaacatttctttaccctcaaatgccaatgtaccattgttttttaactctaacaattgtgaaattaaatgtttaatgtttgatcttactaaaacaataatacccaaaaatttatccaatttttgtttatcaaaatcctttgacttgatagctatcattaaggcatcagtaaaagacaagttgtcctctattcctaattcttccttgataatttttctatcttcctcactcattaactcacttagtaacttaccattttttgctttcaattcaccagtactcctatacaattgagtttcaatatttctcattgtcaataaaccgattctttcttctgttcttgtatcaatcttatcatcatctaaactaattgaaactaaactactggaatattctaaagttttacaaatggattcaataacaatgtcatttaattcattacctttaatggataaataatttaatttttgaacatacggaatcaattctaaaaattgaaccatcgacttggtactcaaattgttgtgactgatgttaagtcttaataattgattgaacaatggaagataaattgataatttcccaatgtatgttttcattaatttgagattggatgataaatcaagatatgataaatgatttaattttgacaacgagttaaaaaatatatcagtatcttgacaatcgattaaattacacgaatttaagctcaacatcatcaaattattatctgtattattttcactattaagatattgaatgaaaggttttaaattggatgacaaatcgttgaatgctaaatcgacaccaactatattagaattggattccaaccaacgtgcgataacataacagtgctgtaaagacaaattattgtaagccaaaccaattttagaagtttcaactaatgataaattcaacatgttggaaaataatttcaaatctggaattttacaacctgtcaaaatgatttcatcaatgccacctctaaaaatgattgacgcagttaataaagcccagtttctatcagatctatcattaatattacaaaccattctactttcagtagctgactttgatttcttcttagtcctttgagtattgacatctaatgcactacattgtgttatatccagtttcttcaatgccttgttcattgataaaaataaacataacattttccaaccttcttcatcaattggtgtatttcttaacgataatttttccaagaatttcttatataataaagaggacaaaatgattctaaacatttcagttgttaatgaaacaccatctaaagaaatacatataactggagcaattctgataaaatctgtaaaggataaaatttcaatcattgaaggtctaggatttcttaaatgtaaataaggtattggatcagttgaaccttttggaatttgttttaatgttgccggtattggtaaaatttcacgtaagtgacaacatctcgtgtataattcatccattttaagtgtaacaacaggagcatccatatgtttctttcttttaaccataggtttgtcaattgtcaaaccttctttttgagcatcaatattttcagaatcagcgtgatgttctctagctttctttgctgccagaattctatcttcagttttaattgtttgatccaaagaagtttgtgatgcagttttagtcattgaagttgcattgggtacatctatttggatattatccctgttttcagcaggtgttccattcccgttttgtttttgttgttgttgattatcttgattaatcaattttaaatgaccagaaccaccaacaaccataccagttgcagaatttaatttttcttggggatcaattttatgaataattaattcaccattcggacaaacttcaacattacccttccttggatttcttgatgggatttgctggggaggatcagtaacaaaagttgtagcagcaaatgcaacttttttcattggtttcaagtttgatagtgcttttaaaggcggttttctatctattttttgaggtgggggagtataattcaaaggttcaaagttgaaaggtggtgtatcttcactttcattcaacatgccgttaaatgcataagttccaggtgtgtttgttttggttttgtgtaataaacttccaaacattgaagattccctctcttctttttctttcctatattttaaaaacaattctttttcaattggagcaccaaatcttggctttgaagttaatgcagaaggtgattttggtgcatttggatgagcaggaatcttatcttcggaatatttgatagtttccaaacctatcggtgtgtagataaaattatagctgttgatgtcattttcgatatcatctttcattttatgtgcattggatgattcaaattcattaatgtaagttgctaattcaggatcaatttctttatattgatcagataatgataaattttgttgaaatgactgtaaaatattattagcactagattcgggtgaagcatctgcatctaactctggtctttcagaggaagtgaaagagtttgatcttgaattaaaggatttagtattcgtagaattagacgatatggatccagaaactgatggtttgagagtggattgttgtgatgtaggagaagatttggaattaacgtttgaagttgttcttgataaatttgatgaggaagatgtaataacattagacattggcttggatgcagaactgcttttgtaaatgttcatttcaggttttggatcatctgatttagatccaaacaattttttgaaaaatccttttttcttttgtgttgatggaggttgtaaaggttcatggtatttgggtgatggctttgcacttactcttgatttcccaacatcggaagtatcgacattagtagcggttctatgtaatcccgaattaacacttgaacccgtattgatttttgaaattggattcatcatccttgcatctgctgttctagtcttcgataaccccacaaagaaattgggatctttggaggtagaagtagtagatactgaaggaggggacttgacattggggattgttagcaattgaaggagatttcaatggagatattggagttgctgctaataaagcagaattggagactcttggtattgttgaagaagttgaattggtactcggttgttgaatataatcactagaaagtgccgaacatgacaagaaccaatcataatcagtactatcggaggacgacttcaaatgggaaagttcatcctctaacctctttctaagtttatcgtgttgagaggattcggcagaagccattggttggataaaaagaaccaaatattaaaccaatttcaaatttaaaacagtaaaagatggtaagctgccagaatgcaatcgatacaacattacaatactttatgatcatgatatataccatgatataaaattatgagctgagctggggcatcaactaaatcgattaccgggatttcttcgcggggagtgggtttttttcactggggggttgaagattttttgtgggggtttaattgggtctgatgatgatttatcacattgcaacatgatttcttcttgtggaaagaattgatatttattgataggtcaggtttgatatacagtgacacaatggcattgaacaataaggcattacttatcaacccagggaacgaaaaaggtctcatccttataagaagacttgtccaaagcggatatttaataactgcgcttagcccggacatcccaaattcaataagtacattaggacagcttgaattcactaatcctgaattaaaagattctgttcaaattattacattttcaaatgatattatcaatgatccagctaaaataattgaagctaccaatctttcacaattacccccacaagagtttctattttcatttaatccaaccaaggataactttgccaaatgggatttaaatttaatttatgctttatcaaaaactaatattgttcaaaaagattcaacccttatagtagtcggaagagatgcagagaatgttcctgaaacggaaaataaggcattacaaaagacaatggctaatttatacaagatgttcaaagatgagaatattacattcgtcgatttaactgaagtaggtgctcttccaggtgatgaaagttatgtcgtcgacacatatatgcatgaggttattagaagatcattcaaggtaaaatctatcaactcactagtaaatatttacaaatatattatctaccattatgttccaggtttcctcttaaacattgttatatatttccaatcacttctatctagtttattgggttgctctgaaaaatccaagcaagattaattaattctatctttttacattttttacattttatttactctttatagttcaggaaacgttattattaaactaattttttggtcggtttaaatcatttcaatcaaggaaatatcgttgttatgtctactattattaattaaaagttatatatatcatatcaaatgggtttatactaaagttaacattgatttaggcttttttgatttttctttcttcaaatattctctaactaaatctttgtaatattgatgatcatcgtcatatgttgatatatgaatatctttgttaatcatacttatatttctttcatttttaatcttttgtttcttctcctttttaggaatatctaatctacctatgtacttctcctctcccaaaaacttttcaagataaccttcaggatgttggagtctgaaaccctttgtagcgtctttgcctgcaaatcttaataacttgtcttgtcctcctggatgcatttgtaaaaactcggtaacatcataaacatggaccatgcacacttacccaacaatcatctggtttattgtgcagatttaactcgttcatattaatgagtggtaattcgtttactttgtaataaattatttgattggtatccactatcatttgaaattgtttctagaaaaccaactccggctaaaccgagaattgatgaaagaaaaagtacatttgaaatgtatcctgagttactgtagtattttgcacccttttgagctaatgtatatccccttgtaaacattttgattatctagtggtctaaagaaatattacacttaaccttctcatgattacatgcatgcattaaaagttgatccttatatcagtcctttttaatttaatcaaagaaagaaaatttgaatattttccgattttcggaatgcttcccattttgggaataaagcgccttataatttccacagtctgtgagagataaggcatctgataccgagataacttttatcatatagaatttatatgaaaatttgattaaatgaatcgattcgaattctatatttatttataaatgatttacacttcaaaaaagaactttaaaaagcaaatatcagtcagaaaatcacaactaacagaataaaagaataataatttgtataatatattaaaaaatatatgaacttaaagcataaaaaacaaccaaccacagtcaaacaatctattcaaagtcttgtagagtaatttttgcttgttgacacatatttctgaataatccagattcattcatatacagcttcttcggttcatcaaattccacaattttaccttcattcataacgacaattttatcataattaagaattgtatttaatctgtgtgcaatacataaaattgtacaatcctttaaattctttagcaattgtttgttgaattttataatcagtttcgtaatcaacacttgaggttgcttcatctaaaattaaaatcttggtctttctaaccaatgctctagctaatgcaattaattgtctttcaccaattgaaaagtttgcaccatcatcttcaacaattttattcaaatgaaatttatgtaaattttcgtcatcattcaattgtttcttaacgttttctaaatcttctttattaattaagccggcagtacttaacgcatgccacaacttatcatcatcatgttcatggaatggatccaaattatcacgaattgaaccaataaataaaactggatcttgaggaataatagttaacttacttcttaatgtatgcaatccaagcttactgatatcaacattatcaattttaatctcaccttcaaactcagaaaatctatatagacatgtcataaatgtggatttacctgcaccggttctaccacaaaatccaactttttctgttttattaatacttaaactgatatcttttaaaacatatggaagttcaggtctatatttcattgaaacattttcaaatgtaatttcccctgattctggccaacttggtgctggatcattttctggaatctcatatggtgcttcttgagcaagatcaaatgcataatgattaattctttcaactgagttaaattcattttcaacttgggtgagagctctcatcatcattgttaaaataccggttaaattaataacataagttaaaagtaaacctgttgatgctgcactaatatggaagactgtgaaaacacataacattgcaacaatgaaaacaatagcaaatgcaagaattgataaattagcacctaaccatctttgattaactaaagttaagaagtaagcttcattttgactatcaattaatctatctaatttttgtttaactgtatcttgaactctatatgccttaattaaatcttttcctgataaaacttcattgaaatgtgaataaactagtgatctcttggtagcttctaatctcttaatttctctagcactagcttgataataattagcaataacaacataaaataatacaatcaaaggaacagcaatagcaaaccatggaatataaataatacataaaataatggtacccatgacattacaaaatgggttgataaattgtctgagttgttcaactaattcattatctagaacatctgtatctttggtaaatctattcaacactctaccaagtggtgaaacatccataaatgccattggaacatgaagaatcttttgggttgcattcaaattcaataatttagaagctgtattggtataataacataataaataaaacattatacctaagcagaaagtgtataagaatgaaaacataatgtaaagccccatgtaaaatgctgttggtctaccctcaaatttatcttcaatccaaaacgttaaccaagtatttgaaaagtaattgcaaaaagttgtgataattgcaaaagttaaaaataaaataggggaaaataatttaaatcttccaaaagctaatttaccatagttaagataaacttttaattcaagtgcattaacggctttttcttcatcgccaacaattcttacgatttcatgatcagcctttggaactttatcttcggtggttaattttgacttatttgttaaaacttgattcagttgtaatttgatttcttgttctttaatagcttcttggtcgacttccattggtaaatccaattctgattcatcatctttatctttactttcagattgataacttaacaaatttttgaattttgtatttcttgatttcagttcatcaattgtgccaatatcaacagtactatcaccatttaagaaaatcattctatcagcagaattgatcaaacttaattgatgagttgccataattctagttttatcctttaataaacctaaaatacattcatcaacaatatgtctaccaactttagcgtcaactgcacttaaaacatcatctaataaaataatatcagtatctgcatagacagctctagctaaattaattcttgccttttgaccacccgataatgtaatacctctttcaccaacttcagtcatgtcactacctgggaattgatcgaaatcacttaataatgaacaagcttcaacaactgcgtcatatttttcagaatcaaatggtttaccaaataagatattttcacgaatggttgcattttgaacccatgggtaaccacataataacaactcaccatcaacaaaaacatcaccgtgagttcttttcattaaaccagacattgcattcaaaagagatgatttacctgaaccaattgaaccagtgacaacaataaattcacctttcttaatttgcaaattaatgttatgtaaacccataaattcagttttactaaccgcattagcagtatcaatagatttggatagtgaagtaactttttcaatactatcagttgtagttgatcttgaatttgagtcgatattttcatcaccaatgattttttttgaatccaaagactttctacttgatcttttctcctttccatctttttcgtcatcttgatcttcctcttcatcgtcaaaagtttcccattcaaaatcaccactttcaattttcaatgctaatgtatcatctttaaattcatgaaatttaaattcttcctccttaatatcaccagtacttataaattcactaagttttttagaactaaaaaccaaatctgtagtcatagtcaaagacattggaacaagcataaattgaacagccagaacttgaaataaagttaatgatgaaaaaatatcagcagcagatttagttgttgtgatatcaaatgctgtacagaaagttgccattgaagctaataaaggcattgcaaatgctaacgagactaaaacatttcttaaggattgtaagttcaatacttgtttcatttcggtagatctagcttctttaattctttcactataagaattttcccaactataaaatttgatcattttataatttttcaacaattctttcatcaaatcaactcttatatcagtatatttagaaatgttttttctgagaagtaataatcttttaacacaaacgccaaaaatgactaaaataagaaggaaaataccaataccaactaaagcagcaacaccgatattccagatcaataaaccaatacaaataccaattgggataatagttgttaataagaatgggaaaaacccaattgccatatcaatacgattcatatcagttgaaatcatactttgaactttacttgcagtgaaatcatggttaccctttgcatcaatagataaagatttatcaagtaataatcttgttaagatacctcttgcactagcaccacagatcataaatttatgaaatgcatgattgattgtaatagaggaaaaaaaaatcaagagacaaacaccaatagcataacctacacctttaccaacatttgattccaagccaaaagatttatattcaacgaaattgatcaattttttttgtaataatggatttgttgaatttgcaatatctgataaaattttactgattataccgaaaagataatcaattttcatagttttgaacaagcataagggtataacataggttggtataacaaagtctttcataaccgttttatgataatcattatcattaatatcagatattttatttaaagtaagagttgaaggatcaattttctttctaattaaaaattttctagctgctttcaaaacttcatattcaaaataatttttgaattcattatataaatgatcaacagtttgttcttcattaagataaaataaatcattatctgttaaagttctttgataaccaacttttaaaacaggatttaaccaccagaacatcatttgtgaaacataatttgattttgattcagggtatggttttctttcatctaatgttgggattggtggaacattctttggaaaaagaaatgaaagcattcttttctgtcgtttcagttgaacatcttgttgatgttcaatatcttcacttgatttaacatatgacatttgatactggaattatagtaaaatatgatatcacagtaaattttctttttttctttcaaaacaattaaaaattgataaaattatactttatagtatcaaaaactatgtcttcttatattatttcaaaatttacttgaaaaaaggaatgtagggcctcttttgtaaaaaaattattcaatcaagataacaataaaaatgcttaaatacgtgcaaggcggccgtttgatttgtaattcgtaaataaaaactttatttccgtgattttttaacctccgtatatagtgttacattacgcaatcgatgtattaattttctctttctccaaaggggaatttattagttacagtggacttaatgaataataataggttcgatctttagcatataaaattactagttaatcttatttgattagaaagactgtatataatttttcctggatatattatatacacagagaataaaacataaatgaaaaacaatattatgttacataacaactagctcttttatatattgctactcccaaagttatgttgacgcaaatttaccaacaatttttacgaagcagagcaatgattcaaaattaccttttattacgtaactttcaggaggctcagttattaaaaaaattttaatttgttataaaagggggcatgtccccccaatttgtgttgaagagatatttgtaaatggtagggggacggcagtttttaatatatagtggtatagtcatttaacatcaaaatgtatgtgtttacacattgatttgtcccttttatgctgatgaccttaacttatcacttgggctggatttattataatatgtctgtgtctatgtctctgtgattttgtaaattaatatatgactatcattattagtatgggactggagtggtcaattcaatatagtttggggttaaccgtactaattatttaaattgtcatgaattcccaataattcccaaattttatcttattttcctatatttttctcttttgattttactttagtgtaaataaagaaaagtttccctaatatgttacatcaaaaagagaaatctcgtcttgatcccgacattgtcggtgattcatctcgtgcaagagatcaattatcttcaaatgctaaaaatgataactcagctcctcgtaatcaaaattatttatcaaatatagttgatgaaactaaacatttgatgggttttgatgaaaacaaaaatcaacaatatgataaatctcatgaatctcaaacttatcatcaaaactatcctgaagatggttactcctcttcaaatttacatgatgaatcattgactaatactggaagtggtggtaatactattcataaggctggtgattctagtactaaatatgctaattatagttataaatcaatggttaatccagtcgttgatgacagagacattgaagaaagtgaaagaagaattcgtgatttagctcaagaaaagaaaatggccaaacaatatgatgataaaaaagaattgcctggtaagactcgtagtaacagtggtggtttcttaagaagattaagtattggtggtaataacaaaagtggtaccgcaaataaaaaatattctaatgatacttatgatgatgaatatggttctggaggtactgataagaatgatcttactgatagaagtgtcaatatcaaacaacgtgctggcaattatcaagataatgataattatcaaaatatgggtaataactatgatgatacttattctggtgaaaacattcattctcaatcaaacaatgctttaagagatgaccaatattatggtaatcaaaactatgatactgcacatcaaaaaggtacaagaaataaaatttctgatgattatgttttaaatagtgataatgctgtttctaacgaaaaatatttaggcaaaaattatggtacaactaatgaatatttagatgacaaagctcaaacaaatcgtatgggtaaagagtcattagagactggttatgatactggttattcaaataaaggttataatgaaaaggataatattgcaaaggattattctaggtgaaacttatactaaagatcaccctaataaaacattagatagacatgatacccatgatactcatgatactcattcaaatggtgaaaatactggtattttggcaagtatttccaattatcttggtatgagtggtaattctgaagatgctgatcatgatgataacattgatgattcaatcagagttaaagatgattactctaagaaaatgccaggtgcacttgattccgatttaaatgattcatcttatattgaagaacctcaatggcacaatactgcaaacacttcaggtaatactgctaattatgatacttccaatactaaaagaactgttaattcaaatcaagattatgatgaaggtttaagtactggtcttgctggtgttggtcttagtggttctggtattaatgctggttcaacatcaaagaattcaaaatatgattctgatccacatttttctacttttgattctaaatatgttggtaattcaaatgtcagaaaaactgattttgaacatgatgatttcaaagcttccttattggctccatctggtgttgactctactgaaaatttcaagaatgcacaattacatcaaaaaaatatcaataaaattcaacaacctggtggcactactggtactggtattggtggtactggtacttttgttcaaaataataatgcaaacgtgcaatcaagaaatttatcaaatgatcaaaatacatcaacctctatgaaatcagcacctgttattgttggtggttctaatttaggtaaaacttctcattcaagtggttcaaaacctgttgaaatgactactgaatcacaaccttatcgcctggttcaaaatcctaaagatgaacaacatttaaaatctgctaatgctgaaaacttgaagatcaaaaacaaatctgcatttggtgagtctaatatttctactggtggtggatcaaacatgtatggtcaagaaggttatcaatctaaaaaggctggtatcaataataatacctgcaggtattcaaccaagtaatgcatctaagggcaactcaagaattttgaatagtgattataaaggtatgaaatcaatgaaacaagatagtttaaataccggtaataatttgggtcaacaaaataccaatttacaatctggaaaaaatgcaaatattggtggctcggcttcccatgatggttattatgctggtactaagggtaaatcatcttctcatgattcaaatagtggttcgtatgctactgctggtgttttaacacaaaatgttgctactggtgaatataacacatcaggtttgagacgtgctgatgattctggtatgtatggtggttcgggttctactggtgctactaatgctagtagaactgctggtacaagcgatgtaaataattacaatactatatccactaataagaacaccgatattacaactcctcaaaagaaatttgttagagattctaatggtaaaactgcaaatgttcaaaccgaaaattatggtatgggtggtgcaactaatacctataatgagaataataaatatctttcaaatgattatgatggtaataattcttcaaaacatgatagtggtaatggtttaggtaagattaagaatttgtttacaggtaaggataagaaacaaaaatcccacgttgggaagaagaatgtaggtgaacatggtactgttttcaatgataataattttcaatctgatactggttataataatcatgatacaaataaccttggtgcatttactaatgataattacactacttcaagcacttctaacaacatcaatcaaggtcaatatcagcatgatagtagttctcatttgaaaaattcagaaatgacttctaatacgagaacacaaacccattcaggtaaaatgacaggacatagtgcaggtcaaggttatgttactaaaaatgatagtaatggtggtactattacctatgaagatgacggattacaaggtacccaacgtaagaagagtttaattgaaaatattaaggaagttttttaatttattgatgagtttaccgttctttgtctaatgtttttgtattttctgtaatgtgaggtttaatgaaacgaattgatatataatttaaataataataataataataataatgaaagttaatactaatcaacatttaaaactgttgtatgcatcattcgatgatgcataaagttcgatgaagcaaagcagtgattacgtaattaaacggtcaaatttaaaacagattgtatctcaaggggcgagaagatcacgatgttgatgtaattgctttggatcctccagaggaaggttatattaaaaaatctatcataaatagaattgaatcagttagcaagaccaaaatgtcattttttcaaacttttcaagatcaactgcaacaaacaactcaacaaatttcttcatccttgaacaatttgaatttgcaagatactgctgcacaaattaccagtagtgttcaacaaaatatttcaagtttagagaaagaagttaataacttaaagccaatatttgcacgtacaactcgttcattacaagaaaaatttggttcaattgatgatatttctgaattaccaaaagaatataaagatttagaaaaaagagttgataacattcgtcaattttatcaaaatatactttcaattactagacaatatgaaattgaagcatatgataatccaactaatttaaaggaaagtttaaatgattatacatctttattaaatgaaaaattatcaggtttatcacatgcaactacaactcaagaagctgaagctgttttattatcaggtcgtaaggataaaattccaaagacattctctcatcaatttagtaaaacaatgagtttaactagggaagatattttatctaataaagaagtatcatcaattaaatcaattttaactaaaacttctgatagaaagtcttctgataatgttgcagctgaaactgaaactgcagaggatactgaaagtaaggaaactccattaactactgcattattgaaaatcagtgaaacagaattaaagattggtaatgaaagattagaacaagataaattaattattgttgaattcaataacaaaattaataatttattgaagcaagattttgttaaatgttcaaccttaagaaatcaagttgaaactgctagattaaatttcgatacagttagagctgaaattaaggcattacaaagtggcaatgcagaagctgaaattcctcaagcattgagtaagaaacttgaggattgtgaagatgacttagttaatgcaactgaaattgcagttgaagcaatgaaagaaataattaaaccattagaatctattaatttattaaaattattattcaagattcaactaaattaccacaaattcgttgttagtgaattaacatcattagttgatggtttagaaaatattccactagatgatgacgaatgatagtattattcttaacatatcatgtgtatttaactttagttgttgtttatttaccatttctcataaaatataattctgtagaaaaataagttttaattgaatttataaagcgattatactagaatacataggggtattgacacattctttttgcaatgattacattaatgtaaaccactacaagctccgaaggctttgttaacattgagaataattgctaatctattgaaaaagatctcaccaaaagcaaggcctaaacatatagcaaaaaagtataaaacaacgaaactcatagcagcaagcatgattgcataaccaaacataacaattgtaaaagctaaaaccaacctaatgaaatcttgataaagatcctttaatcctatattaaacaatttgctaataacttgaccaaatgttaaatttgattttctaaatgcatctggaactgattttttatcaattgagtcttcaggaccacattcacaatcttcttcaacgacaattgtatttgaaaaattgtggaaaacttcttgttcaaggtaagaacttaagaaaattaaacctctgaagaagaaacatgaaaagaataaaacacagaagataccaaaagcagcaccagatgaatgtgcttctaaggttttgaaaaaaacaggagcatctttccaacgagtagtcatccacatagtcatagtcattgagctattaccactcatatccataccgtccataccatccatactggacatagttgacatacttgaagttatacttgtaatagttggcatactcatacttgccacacttgatgtcatactactcatagtggaagatatatctgacatatccatacctgacatattcatttttgtttccttgataagttttgattaattgatgaataagttaaaacaacaattcataattaataaagaatatcaactctataagtacaattcttgataattgactcaacattgaaagcataacaaaaaaaatgatttttctgtcttcactattgttaccattggctaaattaatttgctcacttttacccttttcagtgaaaaacttctcatttttttagaggtccaaaaatttacaagattctcaagtcacccgccgcaatcccttgagatacttcttgccactgcgccacatacactgaaccttcatttatactctcattggatacataagtgtctctaattgcactggttataacagggaatgatttatctggtataacaaccatttctttatcctcccccaaattaccccgtcttgtcaaattcatctttttcaaaaattgctcttcaaataaatcatgttgcatagataaatgtccttccatgtatgtgatttcatcattgtttaatttatccttctcttcttcatgttcttgaatatatagggcatatttatcaatttttcttagtcttaatctaacatatgatctaatcatgaattgaattctttctagttcactttcaatcagaacaagtattaacttaatatctttttcctgtgtttgtaattcaacattattcatttcaataaattctagttgtttcctgattctttcaaacattcgtttcatcaactcttcttcatatggtaaaatggtgggtaccatcttttcattaatccaagcttgctttaatgtttctaagtcacgtctcttttgattttcaagatgctcagtattataaatatcaacacgtttactttccttcaatccttcatggaattcagcttcaaaatcgttaataatatcattagctattctgtcttctctttccgcttctctatctctatccattttggtcttccttttcctaactctttatcaagaatctttacgagatatcacatttaaaagctgaaacaaaatttaattacaatacgaaataaaaacgcgaggtttaatttttttatcttccgggttttgacaacttgaatcattaataggaacagtgacaaaaaggcaggaggcttgtttaatgtcacacatccaacatgaatgaagaattattgtcaactggatctttatattctaataatgatgaatatgcaaaacaacttaaaagaaatttagaaaagcaaataagggaagaattagaactcaagtatcaaaaatcttatgaaaacacgattaataaaattaaatccgatttaatggaatcacaccaaattacttcaaatttcactattcaacctgaagtctctccaaagaatgaagctatagaattggtcattccgacaactaaaataaaagatattgttttttccactgatttccaaataaatgaatcaaaagaatctaatttgttgctaacactacatgatgatttgatatgtatatgggattatcactcaaatgaattccaattgaaacatcagataaaactacattcaaaagtaaatatggcaatatttgatttacaatcttcagataaaatatatgctgcttcggataatggatatatctactcttacacgttatctgattactctcatacacgaactcaaattcaattatcttctttgattcttatttatcaattatcaatacattcaattattgcatttacagttgatggtgattatataattctagcaggaaatttagttgatgttttgagtccgccgttaaatatcttttcatctcatgaatttaaaaaggactatcaacaatccaaatccaaatctgttttaataacaacttgtctgatgataaactcaaataatctagtaattgctctgttatctggtgaagttttgctagttgatttagcaaataaaagtatatcattgttatacaaaccaacatctaatccattacctgcagttttattatcatataattttggtaaattattgacactaggtttagaccactcaattaatataataaacatttcaaacaaaattaaacttgttgatacccttataatgtcagagttatcattttctgctgattggattgatcataattcaattttaacatgctctatccagaatcaagcaacaatttggaatatcgataataacaagctaagaagagataaagttattgatttatcaacagtgggtatagatgaaaagcaaaatgcaaaattaatgaataaagttaaaccaatgatttctatggtgaaaatggttgatggtcatgtcatagtaggagacttgggtggtaaaattctcagtactaagataattaagtaaaatgtttaatgtgtataaataaatacaaagtgttctaatgggttataaaaagttttcaaaaagggaattgttcgattcaataacaatttcaccaaacaatctatcctgtttcaaagtgacatttttagctgtacctaaaacaagtaattcaaaaaatgttcttgtagcattactcttaggattttctgataatttacatgtgtctaaaacctctgtaaattcaagttttttatcatgatcatgtttgaaaattgttcgaagttcttctgcaacttcaactgttgctttgttttgagcgttcattgattcatattcaccatcaaaatcgttttctttgtggacctctatattgttttcaccattattatctaattcatgtaactcttcttcttcttcttcttcttcttcttcttcttcctcctcctcttcgactccagttgctgctggttcttcttcttcggcttgaggaatttcagggatggtattgtcaaattctggtaattgttgatccaagtcatttaatatatcttcttgttgataattatcctcaatggctggtaattctggtggcatattatcagtttgtatttctccttcttcaaccaatacagttgatccctctatttgataactattttgattcaataaacgtcttcttttaatagatttccatgatgaaccaactaactgaagaaagctaggttcaagtgagctcataactttcatatatgcattttctttaaatttatcagaaatatcagtagatacttcacgtaatgaagcaggatattcagtttgtcttttctttaattcaattgaaggaatttcattagtttgatcaatgactaataatcttctttgagttcttataacgtcagtattcaatacatcaagtcttttactcctatttgatttatttcttggttttctaactctactagctcttcgttcctcctcttcatccctattttcttgacccatgtcaatatcattatcttcaaaaactgtattatttgctgttgctgcatcttcattatttgtttcatcaatggtaaattctaaatccatgttatcaattgctgatatttgaaaatcactaatcccagcaattgcatcattatttctatcgttatctgcactgatatctaggtttaaatcatcgttgttaatatttaattctgatggttcatcaggctttgttcctaaatctaaaggtaaatcaaaatcaggtgcaccatctaaatcatcaacttgtggtagagctcttctagccaaagcatcaattgattgattcgcataatcaacactatcttcataatcaaccacattatcatctatacctacactatgattaattgtggtttcattatgcatattatttctaccaatactgatatcaccatcttcttccatcatggtatctgaatttgcccatctttgggtatttgtgattgattgaggtatcccaaaaatactattcaaattaaaattatcgttatcataaagaatattagcttcagtaattgtatcctttaatgtaatattctctaaagatgatagcactgtttcttcaataggcaatgtaatagatttggaaactgcaaatgctgatcgaagttggattaaagctaatgaaacttcctcgtatagataacgagtctttcttgaataaattttaactacaccatacaataactgacttgatattctcaaaggcattacatcagttgtttttgtgctttcaggcttaacttcattattttctatttgtgtctcaaatcttagttgagattcagaatcacctggttttaataaaactgattcaaatgaatttgatgcttcaattgcacgcgttgagttaacgatagaggtctttaaatattgttgtttggttaattttttctccaaacttgcggccagccacacgctagcaagtgggttgtcaccatatagcaaagatagatccggtgcagacattatttcttgatgtttttagaaaagaagtgtttgttgttgtcaatatcaaattttgtagccctgaacttgtattacagctttaacgcgttacttgaaaaatggatttgagattacgtaatgttgtaatatgacagttcacaaaactgatgtggaatcgaatctatatattcattttggttcttttatggtacatattagttgatcttacattcaggtagtttacttcatgcaaagagtttgacattcattagctggaatttaaaatctgaactacagaactaatatgttatttgtttgatgtattacagtcactggctagtgaattcataacctaaattcagacgagtgaattcatgatttcatttggcaatctagcggcaatatcattgctaccaatttcacatacataaataaagatcatgactaaatagtcaagattagttcacaacaatacctcttcttctcatataacaatcttcaacatctcgcgtgcctctaaatttcctttttgggaatcttgtgtttccctatttgggaataccttgtgaatagtataatcaattacttaggtggaatagctgtttgattaacagttcaatttacatctccttttttagcgacactggttttgttgttttctttgcttctatttgagtaaaccatacttcactcgccggtttattcttttttaccatgaactcgggcgcccagtttccaattcatggtattgaaattaatgaaattagtgatgatgatgtcgatggtgataatttatcatatgattcaattggctcagatagatcatatattttaagaatgcaaagtcttggtattataccatcaatgattaacagaaaatacaacacaacaacagaacaacgacattgacaacgaactccctagtgctttttgcccagaggtgatacaaacccgacaaaaaagaaatcaattacccacaattgaatttctttgcaatccaaccaacacaccaatccatgaaaatgatattgagaagaacagaaatcaaagtgatgatcaaagtgactttcaaagatctatcatcaacgacagtagtgaatgttcttcacttcaagctaattctcttgaattgggatctttatttaaatcaaatcaaaatctgggagagttcacttggggtgttagggctcgattatcaaatgtaagaaaatgttacacacctgaaaataaagagctacaaaaatatagcttatttaatcattctctttatagagtcaaaaaaccgacacattcacaaatacgaaaacaaaatgaaattaattccaatcttttgaaactacagtctggcacaattaaaagtggagttataaatcctcgggtagactgttcttcaaagccatccaaacgggaaacgcctgaatatactgaaaaatcatacaatagggcacgtaaatattgggcatttattaacaaccaaagtgctttcaagggtttattaaaggttgaagaatctatgcttaaaagatatgggttgaaacctgttgaaaaagagattattaagatgcatatagtagcatcattgctgcccaactatgttgttgtagataattttaataattttcaagataaagatggttgggtttatgaaacgagtgacttacgtgaaatgagtgaatgtcttagtctgagatggtgtggtcaaattcaaaacttttataaaccgtttgttataagatatcgtacagataaatttggaaaacaacaacttgataaacaagcactatgtccatattgtccttttgaaaaagatatgaattttgacaatattttccatcaaatcgcaaattcatcatatttacatcacgttacaaaattgcatggtgtttatagtactgggtatgaatttgctattcctttttttggtatggataaaaatgatgtctttgcggtctgtagacactgtggagataaatgtaaactcatatttcataagaaaaatgatatactgagaaactgtatgatttcatttaatagacatgttctgactttccataatgataggagaaacaggagaagtcctgagaggattagggaagatgaacggaattttgaaaagcataaagactttttagtatatgaagcacttgaagatgctttcggttgatagcaaattgttataaaaaaatttcttaattaaaaactgtatatctacattatatataaaatacacaaaacgacatgaaatacaaaaaagcaaaggttatcaaaacaaagttgactttggattattcagttttatcaattttgaactcttgttcagcaaatgtaatataatcatataatggaactctaggaggtgcatgatcctttaacatccattcgcctaatgattctttgtttgtaagtggttttaaattatcaataatattaggatctgataaattccaagtattatcataaagtttcatttcagcttcatgagcatgtgttaattctttattgtggtaaacttcttcaaaaatgttgatgaatggttttttttcagttttaaaatataccggactttttgacaaataattaattacttgtgattggttcttcaaatttctttcttcatccataaggtactcataagtatatattaaatcttctgatgtaatatcataaattgattgtttaactaattcataaaatactttaacttgattttctctatatgttggacaaacttcacgagcttcgatttgatcatttttctttatttcgttaacacttttatcaggttttggatttaaaccaattgccagttcagcttgtagtatatcataagcgtataaccaagctcttaaaggtttggaaaaatgataattcttatgttctgtattaaataatgcatcatgagcatattcaatttcaacttgagatcttaatgcactatcattaacagcaactaaagttggagcaccttcatataaagtgagtcttaatggagaaaattgatcataagaataaaagtgacggtttctacagttgaatattttatgttgtttatgaatatccttaacagatttttcaagatttctcttttctttcctttgtttatcatctgcatcattcttattttctttattatcataatttttcttggcagcttcaaaggattccttttctttttcgaggttttctttctcaattttaagtaattctctctctctttgaagtttctccttttctgctctttccctctcatctcttaacttataagctctctccatttcaacttccttttgtcttgcttcttgcagaatattataatcaatttccaattcatttgaaacccatttatcaaattttttcaaataattttcatccatttcatcctcagatacacttaatccagtaatatcaatatacatacctgaatcaacatcaataattctggcatcaataatattattaccattacccttttctcgatgtgtaattgcagtaccacaatcaacatatcctttagcagttccatattttggattttcaacaatcattgaattattatatctaagacaaaattccgctaaatctccaattggcatttgaacatctgcatcttcatcccatggaaatgacattgaattaaaataccatgacaataatgtaccatgtgcaggaattaaaaataatccatcattaaatgtaactgtaaataataaatgtgataaatgtgataaaattgagttttgaatattaggtggtgtagcagttgactttatttcagaattattcaggattgatctaggattatgaattgaaatttcagatgttggcatttcacttataaatccagcaaagaatcttgaatcataatgattaccattttcacgaactttatgacctctgtattcatgatttggagtgatattaatttcatcaagatatttaggaatatcttccgttttcatttggaatgacatcttcaaactatttttaaaatttagttcattatcttttagtaaactatcatctgtttcaaataaatattgatatttagttgaaaaatcaacatcaaaattttcctctggaatatctatttgataatcattattagtgttaagttttaatttgaaactatgttcatgctcaatttcataaaacttatttaattttgataattgatcaattggattaaaaccattatatgattcacttgacaaaaaacttttcaataaaccatttcttaacattgaagatgactgttttgtttcagctctgaaatatttaccattatcagttaaaaaataaatgaaatcaggtttcggtgcatatgataataaataagacttacaattgtatgctttacccataaaagttgaacttttacttaattttttttgaaaattaaaacctggtaataattttttacttctaaatttaccctcatcggttataatataatcctcggtatctaaacatttactcttcccaaccatttgggaagaaggagttgaatcattccattcaaaatcaatttcatatttatatttatcaacaaattgcttacaagttaaagattttccatcatctaagaatttattcaaatatgataaatcaacccaatcttcccatgaaaaagggattgtagctgaattttcagaatattgagtatttaaataatttaaataaacagataatgttataattggatcatataaatgttttgattgtctaaattctaaataagatttaatatatttttcgtctaattctgtatcaatttttgaattaataaaatggctagtaaattttggatttaaattatcaatttttggatttgataatattttatatattgaatttataattggggctatggaagtctcattttgaactgttgttctattatagaaaatttgagatggagttattagataagaaaaagaattttcaaacgaaattccctcgaatcttgaaatattctccttatagagataaaattgatcattaaatgagtaaaaaattgaccctaataaacctatgaccagcaataaggatattgaagcaagtttcctccgaaatcttaaaggtgcaaattgatgaagcatattcgtaatttgaaaggttgtttgatgaacgatgttgagttaaagtagtgtaatgtaatgttttaaggtgtaccttgtgattcaaactaaaaagaatcgatgcggtgataagtttttgaagtgaatgtccagtcaagggttagttcagttaattagtatagtataaaaggcttttcttggttcaaacgatagagaagaagaatatttaatggcgggctcggaaaatcgaagctatgtgtagctagtggatatagatatgcgggaaagcaagtaatatattgtttaaagataagaccctgtgtaagttataactaattattaatgtaaacggaaatggtatatattacattcatgattataatgttatttggtcgtgtgaatagaaacctaatttggatttaattaattaattactaataataatatattttccgcatcgcttttatcacttagaaaaagaaactttttttttcatttttaaattttaaactgttttctattgttggaattgtttttcttttaccgctttgggatttttaattgcagatttatggatggaggatgtcgtcggtattgatgataatgcattaaggtttcgggaattttttacattatttatttattttttattgattagattctggtagcaaaaaaatatatagcttaattacagtatataatgtgaaaagcagttgtaaacgttaacaaataaaataaaataaaataaaccaaactaaattaaactaaactaaattaaaagcagcgttataaacaaattgggattgctgtagtgataaaaaaggagtgaatttaacaccctgcgcaatccatattgagtaagtgtaaagaacagaaaaatagggaataaagaacattgggcaaaaataataacgaacttaattagtatttgtgatatatttatcaattgatattaatttgattcctgatttttaacgggtttgaactcttgttctgaaaaatgtatgtaatcatataatggaattcttggtggtgcatgatcttctaacatccaatctcctaatgttttcttactatcatcatcaattaaatcaacaaaatcatttatatttggatctgttaaattccattgatcatcataaaacatcatttccatttcatgtgcatgtgttaattccctattatgataaacttcttcaagtaaattaataaatggtttactttgtgttttataattgatttcactctctgaaagatagtcaataacttctgattgattataaaataaatcttcctcatttgataaatattcatgtgtatataatatatcctctgatgttatatcatataatgattctttaaccaattcatagaaaacttcagtgtgattttttaaataagttgggaaaatttcagatgcatgaatatttttctcttgtaaaacatcttcaaatttatcattaggtttgggatttaatcccagtgaaatttctgcatgtaaaaaatcatatgcatgtaaccatgctcttaatgctttggagaaatgataactttcatattcagtattatttaaagcatctggtgcatattcaatttcaagttgtgatcttaatgcactatcattagctgcaacaaatgttggtgcaccttcatataatgttaatcttaatggtgataattgatcataagaataaaaatggcgatttctacaattgaaaattctgtgttctttatgaagatcaagtgcagttttttcaagactccttctttgaggtttgttttcttcattattatcatcattattatcatcactattattatttgaatctttatcattgttattcttttcttgttcagccttttgcttttccttttcttccttctccttttgaattctatctttttcagcttttgcttttccttttcttccttctccttttgaattctatctttttcagcttttgctttttcttctctttctctatcggctttctctaattcaatttctctttgtcttgattcttcaagattatgataatcaatttttaattcatttgaaatccaattatcaagtttttttaaatcttctctatccattgtatcttcagaaacacttaatcctgttatatcaatatacatacctgaatcaatatcaataactcttgcatcaatgttattattaccaatacctttctctctatgagttataacagttgcacaatctacaaaaccttttgctgtaccatattttggattttcaacaatcattgaattattatatctaagacaaaattccgctaaatctccaattggcatttgaacatctgcatcttcatcccatggaaatgacattgaattaaaataccatgataataatgtaccatgagcaggaattaaaaataatccatcattaaatgtaactgtaaataataaatgtgataaatgtgataaaattgaatttttaatatttgcaggtgttgcagttgattcgatttcagatgatgattgatttaaaattgaaattggattatgaattgaaatttcagatgtcggcatttcactaataaaaccagagaaaaatcttgcatcataatgatgaccattttcacgaactttatgacctttatattcatgttgattgataatattaacttcatcaaaatatttagaaattttatcaggattaatttcaagtgaaatttttaaactatttttaaaatttagttcattatccttcaataaagtatcatctttattgagaagttctttaaatttagtaataaaatcaacatcaaaattttcctctggaatatctatttgataatcattattagtgttaagttttaatttgaaactatgttcatgctcaatttcataaaatttatccaattttgataattgatcgattggattgaaaaccattatatgaattcacttgtacagaaaacttttcaataaaccatttcttagcattgaagatgactgttttgtttcagctctgaaatatttaccattatcagttaaaaaataaataaaatcaggttttggtgcatatgataataaatatgatttagcattatatgctttacccataaatgttgaaactttatctaattttttttgaaaattaaaacctggtaataattttttacttctaaatttaccttcatcggtaataatataatctattgtatccagacaattagttttatcaacaagtgaagaagaaggagttgaatcattccattcaaaatcaatttcatatttatatttatcaacaaattgcttacaagttaaagattttccatcatcctaagaattcattcaaatatgataaatcaacccagtcttcccatgaaaaaggaattgtagctgaattttcagaatattgagtatttaaataatttaaataaacagataatgttataattggatcatataaatgttctgattgtctaaattctaaataagatttaatataatcaatatctttattaaaatctatttttgaattaatgaaatgattagtaaatcttgaatttgaattaacaatttttggatttgataaagatttataaattgaattaataattgaatcagttgaattttcttgttgaatagttgtaatattattaaataattcaggtggtgtaattaaataagataaagaattattaaaagttatttcttcatttggataaatgaatttttcttctaataataaaggattagttaatgggaaataaatagatcctaataaacctataacgaccaggaaacatatagacaatagttttctacgatatcttataggtattaaatggttaaacattagtataaagccggtgatttagtgtagatgaggttgataaataaaataaggggaaggagaagaaattagaagagaatataagagattagagaagagaagagaagaatagaataaaacatacaacaaacagtataacaatatccaataagcagataaaaacatcatcaatatcaatatatcagatatatatatcatcatactttactttaaacagaaattggtcgtgtgccttacaaactggaaaataaagttttccccactagtgaaaatactgatttgagagcgggctaccctgaaggaaataacacagttagtaataataataacaatacattattatagcgtgaaaaaagagaaatatttatagtaatgtcagggcccaggcggtgtcataatgcaaaatgtgtaatttttggtctccagaattttattatctaagatgatctttattatctttattctcttacagtttttctagaatcctttcgctggtttactctcttctcagtggtcaatcccagtggttatcttacatggatttcggataattttcgggtttatttacagttttattttttatgcaaaaacaaacttttcatacaagatttgtctaggtgcatagcagtgtatgtactggtttgtaaacccttaaaatagatatattacacaaaattacaaacttagataaattatatataatatcctgaatcgacaacattaaaagtgcagacggacatatttgcttttttttttccttactacaccgggcgcggaattagcacttaaagccttctgaagagcaatgttctgtgatttagttatatatagcattctgtgaatgactatataaagtgaactacttctctgctgtaattgtcagattctgtactgtaattaagcagctcctataaattaaccaagatgtgtgagttttttggggataaaatgctaaatgtttggtgttacacaccaaagtttcttttttaaactaagtgtttaactaaattatacatcattttaaaatgatttctgataataacaataatcatcatcatcactttaacggtgaatcaggagatgaatgtgatattaaaattattactcaactcttaccttatactttggatttaaataaagacattgatgatcaagatgattatgaagctaatttatacaattacattactcgttatgcagattatcattgaatctgatgatgatgaatgttttcaatgatgattcatcaatttataatgatgatttctctgatgattgtacaacagttgcaagctcagaaccattattagctgatttttttgaagagagaagattatttattcaaagtattagatatttaactgtaatggaacctttatttgctttacatccaactgaaggtattacttatgattatgaaattgatcttgatagatttgctgatattaataatagatttaatgcactttaccattttagaaatgaacttttagaaatttatgattttgattcaccattatttgatttaccatcattagattcccagaatttaaggaatttgaatcataatcataataatattaataatttgaataattccaatgatgaagttttaagtgttgaaattaaatctgaaactgaaactgaaactgaaactgaaactgaaactgaagatgagaatgagaatgaaaatggaaatggaaatggaaatgaacctgcttttgatcttgaagctgagtttagaaatgcattagctactagactcgattatgatgatgaagatgattatgataatgatattgattatgaaattgagcaattagatatagatgcacttaacattggtgtctattttccaggtttagatctaaataatttatctgaaatgtcaaatactccaaacgataattatcaaagaactctattatctacattcgaaaattattggtctcaaaataatccttcaattattaatcaaccagataatattacagataataacatagataatacattagataataatgccaaaaatagcactgataataacactgatgatactactgatgctattgctggtgaaataggtgaagatgatatttctgtgatttcactttcctcattttatgatagaatcttatctacaaaataaacacagtacataaataaatttgattcctatataatatataccctaaataataataataataacaacttttaactgaactttaacttatgattaattgaaatatacttctaaatgtgtagtttaattgttcctatcgtatgacaaataatgtagacccctattttttttcaaaagggtagcacccgagtttcgggaatacattagacgaatttcttaaaatcgattaagtttgtttgagtctcgattctttgttggaactttatctatccggtcgtttatcttaccttttttgattgattgtaatagtctcccatatattacccctcactctacttcactctgttggaatctgacagctgaacaattaaagcatcgaaattaatcattttttcagttatattttatatgtataattttacatttttatagatttgttctctttaaaatcaatgctatgtaacaaaacagcgtaaaaccagtattttgataaaaataaccaaactgaaaaagttagcttgacaacagttcacaaattataaaaaaaaatttttcaaatgcttaaattttgaaaatattacttgaaaaatataagttcaaaaaacattgccaaaaacaataaatatgcaatataaataaataacttgtaaacaaagtccatatatagtgttgtaatacagtataaaatataaaaaaagcataaattaattattacgcaagcttacgtaatcagttggcattcactccatttatatcttagcatttttaagcacaacaacagctcttatggccaagttggtaaggcgctacactagtaatgtagcgatcctcagttcgactctgagtgagagcagttatttttgattttttctacaattgatttaactaagagtaacgcgttctgtataacgtaatcatcaaaatttttaatagtatcacacaattcaggtagaaaaaaatctagaacaatttcttgttttaaactataattaattttgattttatttttattccatcttatctaaatattacactcccacttataaaagcatataagaagggtgtctatgacgttatgtgcgatgaaatactttttataatcaaaagagatgaagaaaaatcagattcaaacgatgatcaaacttcatcttcaacttcaaattctcaatctagttcaactatgagtagtttaaatgctgaacaatcatccgttgatcatttattagattctcatggatgtgttatttgttcaggagcaccagcatgtccagaatgtaatagtgatgaacaatgtacaatgacaactcaaacatgttttgaatgtccaagaacttattgtgttagtatatctgaggcttataatgttactgaaacaagaaaatctttatcgagtgcagaaattggtggtatagctggtggtttaagtggatttttctttatattgataatgtctggtttatattattgttatagaagatttaaacttaattccattagtgattttgaatatggaattaatgaagaaatgaaagaattaacaaaatttgttggaggtgatggtaaaacaataaacgaagaaattaatgaaacttctgataatgtaaataagagatactcacaacatagtttatcaacaatgacaaattctgttttgactaaagcttctaatgttttaaatattgtttatgttccaggtgtgacaagtagtagacctactaagccaccaagtatattaagtggtagaagaaatacaagaaaaccaacagcttcaatgtatagtaagggcatgagtgtttattcaaaggagacttattttagtgatttagagaatgcatcattttatggtggtagagttgccatgaaaggtggtaatcctacattagttgaaattaaacaagatgattataattatgatgatgaagatgatgatcgaataatacttgaagatgatgaagatgacgaggatgatgattattttgcagaggaacacgaagaaaatgaagaaaatgaagacgaagaagacgaagaagataatgatgatagaggtagtggtatttttccaataaacattaatttgaagatacctaaagcagaatcatgtggaagaaccattaaacgaggatgaaataattacagacaatccattcagcaatttgaatcgtatagatgaaaatgaaaatacaatagataataactcttttgctttaaatataggtatacagggtaaaaccaccgaacgtactgttcctaatagatatgctgcattgattgaaaagaaagagcaaaccaatcaattgttaacgaaaccaaataatgctaataataatccaccatatatcttaaatagatcattgtttggagaaagtgattctaacagtgaaagttcatcagattccgatgaagaaaatatcgaatatttactacaaaacagtgatataggaaccggagggggcaatacccgttctacaggaagcaataccacctatatcaatggacatagtgatccattctcatcaattcatgattaagttatatatcattacgtaataccaaaaatagcttttttttttccattttcaaagttttcattctgtttgttttgttttgttttgtttttgtttgttttcctttctcgatttctcaaatcatcatgttgtagagttgcaatttacatatatcttgaattattctcccctccttttcagaattttgtatttgtttagcaccttacaacaatcaatcgcctgttccattgattttgcagagtaaactgggtatctcatatttggaaaatcaaagattaaccagcccatattgtattatagagcattaaattaaaaaggaaaacgtcacataataaataatttctttgaaacattttagtttttaaaccaaagtattattgacatacaaacaaataactacatttcataaatcatatatatatatatatacctaatagagacaaatttatatattttaaacttatctctttaactcgccattagcattttagttctacattattagtacatattttaatccatatattataatatatcatattctcatatcatttacacatttttttaatttcagttcataaacaaaaacaaataaattagttcaatttaattatattacagtaaatatcacataatgtcagatcacaaaagaccattatcagttaaacggttttacagaaaatacattaccaaaatctaacgaaatgaatagcaacatgctaaataattcacaattgctcccaccggtatgtgaagattcagcagatgatgttaactatatcataaaaaatctaagttgtcctgcagataatgtaccaacttatgtttccaaacaatataataatgattctattgttggaaatgaaattcaagcatatgccaagattgcaggttgtaattggacttattatgttaaaagtttatcaattaccttaggtagaaatactgatagttcattcaagcaaaaatacagaaattatagatatagaccttggcccttcaaaagttatttcaagaaaacatgcatccattgagtatgatttgaatggaaggaaatggcaattatttatacgtggtagaaatggtttgaaagttaatggagttagattaaatttaccttcaacaactccctatgatttaacatctggtaatataattgatataggtggtacacaaatgatgttcattttacccgatgcaccaccagttattccaactcaattccgtcacttgttaaataataagagacaaaaattaaatgatgttgaaagtaatcaagtaagcggatacggaaattcaataggatctaaatgttaaatcagatattataaataatcaagttaaggcatttcaattacaagaaggcgtttcacaccctgatagtttatcatctgagcaagattattctaaggatgaagctaaagatttaaagccaccttattcatacgcaacaatgattacccaagccattttatcaaatcctcaaggtattttatccttatccgaaatttatgattggatttcaaatcattttgcatattatagacataccaaacaggggtggcaaaattcaattagacataatttatctttgaataaggcatttgaaaaagttccaagaaggccaaatgaaccaggtaagggtatgaaatggcaaattagtgaatcttatagaaaagaatttcttgaaaaatggaaagatggtagtttgaataaaattagaagaggtacaagtgtttccagacaacttcaattacatttgattaagaataatgttctgccaagtggaagggaaagacaactcccagtttacgcatcaaatggatcaggaattttactaaatgattcaaaccttatcaacttgtcaagttcaaatatgagtatgagtaatcacaataataatttgaatatgcatgttgatatgagtaacagcccaggaaaaaactataaataatcatcaaggctcaaatttaacaggtttaacatcaccaactaaggtaaataactctgcgaatgtaggtaatttaaatgttccacctacttcgagttacccacttacaaatctatctaataataaagttatgaataatgatatgaactttttaggagacaattcaaattctaattcaaattctaattctaattccaatttaccatcacctgttaaaaactcaagtatcccagaaataacatatatgaatgctgatcaaaaatactcaactggtttggtcagcagcattaataataccaataattctgatcaattactaaataatgatacagttttgaaaaatatatctaatgaaaactcgaatgataaaattgtacctaagattgaaaataataacgataatgataatgaacacaaaaacaaactttcaacacaggaacataataatgatgacaataaaactgacaataaagaaataccagacaccaatagtaagtcagtctctgatgatttagtacgaaatactttaccaattccaaatcctaaaccacaattcctcaaccctcctgaaaataatctgcctatgttatcaccaaagaaatatttctctagattggaaatgatgacaccagaaagaaatattcaaaggcctgttttagaaccaaattctttacattccaatggatctgttaattcatcacctgcattatggaactatgttcaattttcaacaccattaggtccaaatactggaaacagtaatataccaactacaggtaatgatggcgataaacttccgaagatcgaattagaaagtccattgaaaaatagaaaaactttgggtaaagtttgcgactttaaagatatcgatttagtgaaaggttttaaacaataattatgatcttttataatgtaatttaacaatccattttatacactcgtacacatatatctatatattatttataatataatctatagagttatgcattataatctttttatacaaacgctaactagtgtacttcatattactcattaattaattttagattctgtattaatgcatttttcatttttttgataatgaaaagatctaggcatcaaaattacattccgaaataaaaccgactaactttcgtctctcttcattaaagtagaatgataaatcgaccaaatttaacatcattatcaagttccttgtaatactgtgttcataacatatatatcgttctaatcaataaattgacgaaattagaaagataagctatatcattattattattagttcatagacattactctacagctgatgaatagaccgcattaactaatatcctggtcacctttaattgtaccgtcaagttttttctcgtttagcatcataatttttattttgattgttaatagtattttttacaataattttgaatataagtaccacacggagattattttccaagaatatatattcaccacctgagcggaaaggaggtcttaaaaattcgtatatgttaaaaatcgaatcaatacaccaacaatgatatcagttaactgcaatagaaataattggtttattctctgggagatttttaatagcgaacgttcaaccggatttaatatcatcaaatctatgtttatttcccgaatcttgcttatttcaatatatcggatgtaacattgatgacataaataaaaatatattactcgtattaaactatatttactccatactggatcaataaacaataacaaaaaaaaaacacagccatcaggttttgatttcactagaagcgttggcaaaacaaaaagtttaacggtcaaaaatttcttgcaatttagatagtatattgtagagttgagttaccgttgtacttcctagacattatcctaaactatcgtaattgacttcttatcaattatagtttccattctgataataatgtatttttactagctcgatctagaagatgtatagtttccataaaatatattttcgtactcatgtattttgtgttctattcaacggtagtttacggtaatttcatgttgaacatttttgttaaaatttcagtaaacaatttctattaaatctttggcttgaaaatatagataatcaatccttttgactcactcaagaaagttaaatctatttgagttttattaggtgataattcaataaaatgggaacgttacactgataccagcgcccattaatattgatgcgaactttttgaaaatggctatatcaaatttttttatttattcttcaaatctttattctatgcatccaaattttttgaaattttgcacaatgcaactttgaccttcttgttataatattaccgttgcaataaactttttctatttggtattatttttatatttttattatctacatatcactaaagtaaaaatagcaatttgtcttgattcgtttaaaggactagtttagtatgtataggtttatcaaatcgcctttttaaacgcgtactgctctacaattggaaaatatagagtttcttataagtactaagtagttcccactgctccaagtctacaaattaatttgaaaataatgaaagcccagatagttaatcaaaccatgctatataactctttgaacaattcatcaattataaattcacaacaacccatgatgaataatgctcctgagaatctttctaatatacatccaagaaattatgctgactattactattatagtaccaatcctccgatttataatccttcagttatgtatcagccacatttttacgagttaaacaattgtccacatataccaatcccatcctacatttccaatgactcttgctatattagttcttcagatataaaacctatcagaaagaaagcatttagtagaagaagtaaaacaggttgtttaacttgcaggtcaagaagaatcaagtgtgatgaactgaaacctatatgtactcattgcaagaaatcaaataaagagtgtgtttacgcagcatctaccactactagcactaataaaaccaaaaggctatctaaatcaacaagaaaactaccaaagaaagcatcagttactgtaaatcatcccataagtcctttattaccagcggctagtaattcacctacaatttcaaataagtctattgatttttttagcagggatgaaaacagttcaacaccagccagtacagtttctagatccgaacaatcaaatcaagaagttttgaaaataaacaacacacttttgccccagcaaaaagatattcttcatgcttccaagtgcttgaatataattactccacctcttcaataccaacaaattgaaaaagaagctcctcttcaattcaatccacattactacactcagatatacgatcagcaaccaaaaagctttagaaataatcattcttttaattatacagcaacaaaatacacacctaatagccaacaatttggctctttaaacagaaactgttttcccatgtatccaaacacagcaacccatttcaatactatgggaaaacattttgcagaatggttaccagctatgacttttcatactccacaatattatccgaattgcaatactaaggaaggtattttttgtactgatgaagtgttaccttccaatatgtctttctttgatgaaaattcagaattaaattcacatagtcataaatctccacatcatggaagagcacaaatgtaagatatgaggagccaaatattatttacagtcaaaacatgctataagtttatatcatcatttttttatatatgagaactccttttagcctaaaattttagttatctagtttttatacaataatcgtttgtttaaaatacttttcttttgctttggttatttttaggcttgctaatgggcaaagcaagcatataaagatatatgtaaaaattaaatagcaagccttttagatgacttattaaactaagtttttttactaaaaaatttgaaaaaggtggtatttttgaaaaatttcactaatagtaactaaacctttttcgtttatacctacattaatagagaacttgtttatagttccattacatgagaatgctcagatgtgatgaaagtttaaattttttttcgcttcttggaaataaccgtgctatgccgatgataagtttatatagtgtcctaaaagcattttagccacagtttggtaaagttgtatattatatgtagagaaggttatacaatataattcaacgttatgagcaaatactaacccggatttggaaactttactgtactccgtgttaaaaaaacgttagatcttaggcaatagattcctcctcatcagtaagatcttttggtatacaataaaggaagtatttgaattatatatcggaggtgtttacagtattatacttacagtgaattacttaaaactaatgtgaagacacattagttaaccatttatggcccttagatattgtataatagtttcaaatttaatctaaagtgaggatttgagaatcgggtttttaacataatttagatgtaaatccgctgattatttaacatacgtcacccccggcgaaaccagagaaaaatttgaagaatcttccaagactatattattctttgcagaaacaagaagaagagaacttttactctttatagacatcattgaggtcgaagttttctaatttatttcgtaaataaatataattcgggagtaatatgggtgataacattttagtcaaactttgtgttatcagtgccttaatttttgctctttctcgatttatataattgtaactttaataaagactcacaataatattatttaaaggctaaataatagaagttacttaatttcagagattgagttagtttgtcgggttatttgatataatgctaaagtatatcatatcactcgtttaggttttacaagtttgctttaaggaacattttgaacaccttaagaaatacttcaaaaactttatatatagcaatatttcttttattgtagattgtctggatatagcatactcacttctcctagatattcatacttagtttttgtgtttcatttataaattttcttttgatttaactgtatttaacatccaattaataactagagaatctcaaaagaatttgtagaaaattttccctcaaaatttaccaatgaataatgatttaagatttacagactcatttcaaacacataatgattatattaattattactatgatgataacagttttcattcatttcaaccaatattttatccacaaccacatgaacatcttaattatctctataagaatgattatgtaccaatccaaccttatccgcaacctcaaattcaaatcccaagtttcaattctcattgctatctaacaagcacaaattcaaaaccaattcgaagaaaggcgttcagcaaaagaagtaaattaggctgcctgacatgcagatctaggataattaagtgcgatgaactaaaacccatatgcacgcattgtaaaaagtctaaaagagagtgtatatacccagaccctgctaccattaaaagatccaaaacagctacagttactaagaattcaaaaaaatcaccagtggcttcatctaaagctaacatttttaatcatttagttaaagtacagaatgaggtccaaaaaacttacactcaatgtttaaccaataagagccggtccaatgaagaggcaaaagaagacatttatatcagagaaatctcatcagttttgtatgaaagaaaatcccctatcaatatagcaagacaatcaattccaaacacaggtctgataacaaaagatcaatacaaagcacaatttaaagaacaacctttagtgcaacgttcagcacaaaaaatacatcaaaaagtggaaagtgaacccattctagggtgtaaccagcattgttgctcacaaaatcagccagtatcgtattttgaacctgtttatgaaaggtgttacagtaatactaatagaatatgaaatagccaggtttacaataggatggacggaaacaatcacatatattcaaccacgccaataaattactacactaatcaatatttacctgataataacaacatagcacaaaaaaacttttccacaaatggttatggtgattcagatttagaatgggaccgcatagccaagctgaaaactcacgatcacatgtttggataaacaagaatgtttcacttaattctttactggaccaaaaagctcattacaaaagtttcaatagcatatccttagctgataatccaattgattataatgatgatgtttccggtgacccccataacaacccaagaatttttcattcatactcacatccttgacaaacaaaaaaattacctacgttcttcatatagcaagttagaatcttttcgtttatattacaaatttatataatattgattaaacaaatttaacatcgtataattacgcttcaattttttcactcgaagtattggtttgcaaaaacatcagtgtattttgaattacctttacatcatcaccggttttttcttctaaatttttttgaactacactaatcgaatccttaatatctttcaaaatggattcaatcttttcaaaatcattgaaattaacagtttcagcaaatttaataaaaccaactaattttttgactttttcggaattgattccatgcgcagaagatttatcaaatacatcatcatagcattttctaaatacagaaataaaagtttcttgtctctcaggactgaatgagatgaatgaatttttttgattactggatcttggaggtaaaggtattgcaggttttttatcagtatttgtttcacccttatttaaacttagcttgctaaaatctttgaccaatgactcgttatcaaatttcgctgtactgatcaacttcttgaaaactttcaacatacataatgtgttatcatcaaatggacagttatctatactatctatcatatattcatatgcaaaatcttctggcagatgttgaagaaattttaagataaaactggagtataatttagtaaacatttctgtagcagtatatgtaaaaacacttggaatatttgatataatggatgctatgttttgcaagtatgtaataattagaagtttggagctttcttcatttaattcttcactagttaaaactattttttctttttcaattttcatgattgttatggtcataaaataaataactgatgttagattggttaacttgtaatcaaccaaatatggaatgaaaacagttaattgcaattttatcaaagataaagtagaaatagaatcaggtaactccatggtccaattctcagaatatttagcgtatgcaaataaaatgataagtgaggaaggagacggcgatagtagttctgtagaagatttgttcctgaaagaagagttgttgtacgaagagatcaccaatttaatgatagtcttcactggaattcacggtttttagagattttgcaaaaagatcatctgctttttcaacctcatgaaccaaactatcaggaattttaatatctaaagataaagacaatgtcaatagtctgtccattaactcataatatggttgtccaagaacctcgtaattttgactaacagtagatggcaatatctttgcaactaaaacacggaaatgaccttgaccaaacttatcaatgattgaatcggctagtaaaacaatcaattttctttgtaaataagattcatcagcaaatattttctcaatgacttcttcactttctgttttgaatatatcatctggcgcatctggtggaacataatctctaataaagagatataatattcttagaatggaaagttgataagatgtttcatagcagtttgtcatatagttcaatattgttgaaacaattaaactaagaaatttagatggatatatagttttaatccttaaaaatgaaaacttcatacattcaaacaatgcacggaatttcaagaccgcctttcttgaattgaaagaaacaaataacctaaaaatataagcatctaaatcaacaacattctccttgtcttcatcactaagtgaacgagttaaaatattaatttgttcttgtgtcatctctaagttgtctgatttaggatcagatagttttttgatttcttcaacgcatgttaaaaataattcttttggattaccaaattctgaaaccaaattgaatactttaaaagctaatgtaatttgaatattatcacgcaatgctggcatcattggccaatcgccatccatgaaatttaataaaagaggtggtatatcccatgcaatttctgcaagtagttccttattttcagatatgattgtataaaagagttccatgagttcaacacgttcttcaatactgtaggcattccagtcctcaaaatagatatctacaactgttaggaaactgatattgtcatgactggctgaacaatctttggcagcttccttgataatgtcaacaatttcagggaaagttagaggtgacatagtattgagagactctacttcagtatcagacattgtttcctatagctataatattcaatgatgctacaaatctatacaatcatacaccaatatatacaaaattacaattaagtataattaattaaaatatcaaaatcgattactgtgaggtaccacaaaaaatttgtcacgaaaatcaaaatctgttcatctcaatgtacgacggaaattttgtactaccattcgtctcatctacaccctcccattgacggataagttcccaagcttgcagttcaccttcatcatcacaatttctatgttcttcctcaattttgaacttatagacgctttcttgaatttttgtctcttctaacaaccattctgtttcatttatcttattctgtccccttttattatcggaaaaactcgtttctgtcgatgaaataaccaagttttctgtatcgatgaagtttttaaacttccaacaatcatctgtttcactaaaggcatactttatgtattcttggactgactcagactttaaaatgtcattacctaatggaggattggtgtttcctaaaatactctttgttatattcaaactcttttcaaatttcttagctatcgcatcttttgatggaactaaaatgcctttgagtgtggacatttgatgaccttctaaattgtttaccgaatcaaaagactcaaaatctttactcaattcaactgttgtgttattggtttctatgttatttgcacagaattcaggcaataacccaacttctttatcatttttgatataaactggaggtagaaataatttatctccgactctattcactaaatctaattcaaagctggattcgtcggagcttttcagactatatatgcttttttctgccttggaaattcttttaattatcaactctaattcttttttaaagtttgaaaaaacattgcctaacataaacgatattattgcatcggttccatcttctctactgatcaatgatatcccatttttcaaaatcaacatgtctcttagtctaattaaaaaccatattaatgaaatatgatgcccaccagcaaacaatgcacaataaagaatagtctcgataattttgacattcccgacatcatctgcatagttactgtttaataaagaaacacacaactccatcaacatatacaattgttcttcatttagcaattttatttctgaacttcttctactattgatttttggaatggtatgatttgatgcataaataaatgacaatctttctaacccaaaactgtatgcacaaagggtaggtttgagtttattataatcttttcctttaagatttccttgaatataaaaaaatttgagctcaaaaatatcttttttgaacgtcatgttgatatcactatatttgctgctaacaagcgatttgcttgttaaattttcaaaatgttttctataggccagcataataaagattgatgctaaacaacctagatcagtaatatcacccataaaatgttctgcatgttcttttaaagaacttaatgcttttttctttttgtcaactaactcttttgacaacccactctttttttccgttgtgaagaattgatacagaagtttacaataaaacacatgtcttctaaactcaatgatcagtaaaaactttctttcgattgactctttattgatctcctttattaaaataaactctttaatcaaattgactagctgacatttcaaaaagttacatatacctgatacaatgtttttcttttttaaattttcataggcatattcaatcacatttttgacactaaaacattgtcccattattggatccggatatttctttatcatactttcaattatactggttactgaatttgatgacaaagctttttctaaaagaatagttggtggaaatgtccaaataaattggtatattttttcaaaagatacctctatgtcttcggagtttctattaacaatagtggacaaaatttccgaactcatttttttatagttttcaagatgcttaatcagagcacgagcaaagcggtgatctttttctttgatttgtgttggagcagattgtaaagcaaattttattatagacaatttagattcaaggacggtgtaattagaaaacatactcatgttgaggttttgatcaagtgcagattcattggattctatcggaggaggttttaacatcttgatatcgaatatcaagtcttgtaacataagttccttatccgttgattttggactctgtctgacaacttctaaacatgtacgaagtaaaacattagccataatcgtttgtccagactctgctagagctttgctaacaaagtaaagtgtgtcagtttcttccttaccttcttttgatctgattgaaatgaaaaactgtcgtaaagcaaatgtgtttcttttaagattatgtgcagctacaccaagctctaaagcccgatcacccgttatagatccatcaaacaatattcctgtgttaaatttaagaagacggagaatattagttaagtaaactattttccattcttggaacgatgtgatatgaccgattgttccttttaccgtgattataaattcatctttacttttttctatgtcattcatattacagtactctgctgtcatgaatggacctcttatccaaaagataaaatatggtaaagctaataataaacatcgatttgctcccctttttgatatccttcccaaataggcagttaaaagtatcccaacatggaataatggattcgcgcaaaaccccaatgtttgcaaattgcaaattgaaactgaatattaacatcatatagactccgtaacttttattgaagcaaaaaacaatcgagaatcataccatacttgatacatatgagtaaggatgactcttcaggatctagctccaatgtgggaaagtttgatagtggaattcatctgagagatgatacgctaactagaaaaatgccttctttcacatttgaaaaatatgttactcatacctctggcctgaatatagaagaagaagaaaagggtgatcacagtaaaaaggcttctgaagaaaataaagcatttgctcacaatcataatgatacgaatcaagatgatacaaaagaggaagaagagtttgaattaaatttaaagggtggatcaccaatgttaaatgactttcaaaatccatttgacgaaactcccaaagtagttaaaacgaaagcaatactagaaaatgaggatactccaatatttagtgattctgaaaaatttccaattgctgatattgaaggtagaatattgaaatcatcaaatttttcattgtctccatcccttatcacagacgcagataaatttcgtaggctgaaagaaaaacatttagatgcaaaaacgtacccaaatcttgatttttctaatgtaggcttgataatagatactaggaaaagtgatgaacatgatggaaatgaggaaaacaccaatgatgattcaagtataaaattgaatttaatacctaataattcaagaagtcgaaattccatcgatactctaataataaacaccaaaaaattaggaacacgaattgaaacacaaattgaaaatggtgaagcaacgcaagcagatggtaatgttcatgaatttgccaatcaaatatcaaagaatttacgaaacagtgctatagacgatgatgaaaatgacgttgatgatgggtattttttaattggggatccagatgctggtaattttcagtactcatcaaatgattcagaaaaaaaagctcttacacaatcacctgtactgtatgcgacacaaaatattgatgaagacgaagacatagatgaggtcgatactctgagaagtcctttgaatgttccagcgagtttgaggaggtctaataaaatgattcaccctagtccaagggaaaagtctgaatgcagagttatttacgacttccacacaagagatctccacttcaagtcagaaacatataaaattgacagacgaatcaaagaaagatttaatcccaagtgacaattcagatactaagctgcgaatgattttgaaagaaacccaaataattggaaacatttcacaatcttttgtcttagatgaagatataattggagaggaaagtgatagagaaggtacaaatattgatctgctagagagtggaaggggtagagatgaagattatgaagatgatgaagatgaaataataaaaactaaaaacactataaaaacctttaaagttaatgatacccaaaacaataatacacaaaataatgataaaactgaatcatctgaattaaagatgactcaaagaattgatccaaacaaagaaatggaagataacaattattatggattacccgaaacccagaagatcaaagatcagcaggatattgatatgatggataatatatcatcaccaattatatcaatacttgaaaacgatggaaattcagatagtaaaattgatggatatactggagaagttcctaatacaagtgcactatctattagtaaaattgacattcaagttgaagacacaaataaaattgacaccgaagtttcagaaaatgaattaaaacctgatacattgcctaagttgaaaagtcatacgtcaagtccaagcttgttgagaatttctgatttgcagatgaacgatgaaaatgaagaacaaagagatatcacaacttccgcaaaagttttagaaaggttgaacagtgctttcaaagatgatgataatatacctaaaacaccgagagatagaatagttaggaatttgaaaaaaagggattatactattacagatgttcttgattgtaatgatgtattttttatgaatttaacgaaacgtataccaggttcaattgtcagtattcttgaaaagggtgaccatagatatgttacaataaaaaccaaaaataatgaagaggtggttgtggaacactctaagttatatgcaccgatttgttttgacattggtgatgcaatcaaatatgttaatgataaaaggacaaattttattattactggattatcaatagaagtttataataaagatgaaatttgtgatataagaacagttgatggattcaacaccattcatatgaagtcaacaaataaaagtaatgatgaggaaattgctgtacctatagaggatatttatttaactggagcgatttctagaagctataaatataaattatttaataatgaagacgatttcaaggaatatgttgattatcaaatcagtaaattcaaattgaacggaagcgaagctgattctagctcgttaaatcctaatgatacattaatacaattattgaaaaatgatgaagtggagccatataaaccaaggaatataaatgatgggaatgaaataagggcatcaagttttttaaacactaacaagaaaggtccattttataaatgcctatttgttatcactgggttaaacaattcccccatgagttcaggatcagtttatggaatgaagatcggcaattctagacaatcatcaccaagaaaacaaaaagatcaatttgaattaaatgccttaattgaattcattaaattgcagggaggcagtataatacaagagacgggatttgaggaaatcattcgttttaagaaaataccaagtaagaccaaacaaacccccaatgttactatatcaccaagaaagaagaaactgttagaaatgctaggtaaagcgaatgatacaaaggaattgaaacttagtaaaattgaaaataatttcaaatattacgaatgtgtgaaggagaagaaagacttttatgaatgtttcattcaaggtgaagatacaattgaaattgaagaacatattaaagattttgaatttgcatgtgtattatcaagcagacatgtgagaacattaaaatatttagaatgtttaagtttaaaatggccaattttaaatattgaatttattaaacaatgtatggaagataaagaattgttaattaaatggaggaagaaatggatgaaatatttattaatttctggagaaagtacattattaaactgttctattggattggatatttttaaatattacgataattggaaagaaggtataacacttaaagatcagttgttgaataatgatattttcaagaagaaatcaacaatgattattacagatgaagaagcagctaaattctttgaattgtatgaaaatggaaagaatttaaagagtggagataaacgtaaaactgcaatttctagtagagagattcaaagaaagaggaaaagaacatttagttataatgaggataccgatagtgaaattgatgaaaccaatgaagaagaggaagatggtgataataatagggaacaatacgcaagagagagtttacataatactattgaaggaccaacatctaatgagacattgttatggatatttcaaaaaatgggtgttgaaaaatgttatattttaaaatatgatagtgttccctataatgttattggaaggattactgaaaatgaaaagggcacattatttctttattgtaaaggtggatgtaaagacttgagtggtagtgtacatgaagatagtagtatttgtgtaattgattgggaatggattgttcaacgtcttatctctggtgtatagtgaagatcatcaaccgtttttttttagtaggaaataatctggatttgatttgattccgaaaatggacacttttttagaaaataaggaaagagaagcgagcaatgattatagtctattaaatgtaaaaaaacgtgacgtaaatggataaaagtagcgagaggaagggagaaaatgggagaaattggaaaataattttttttgttgaatttcgggaattaattgccactgctctgtggttccactgtagttgtattgtattttttaattagaactacatcttcttttctttcattgatgttccttttattttagattgctctgctttcaagtatagtgtaataacgtatatatctaatataatataacctcatatacatcaactagaatcattatcatatagatacaagtatatcaagaaagttaagaatatttcaataattaataattatttctcatcatgtcggtcactggaactgtggctacattcttaagtacattcattttgtacacatcaaatattatcacataccctttcataaatattttatcaacattatattcctcaatagtatttcttgttacaggtgcattaccatataagaataataacaacatcaatagtaaagaatctaataataatgaaaagattaattcaagtttattatttacagatgaagatgatgacatcaacgataatttattcccaacaattgttaacattgataaattaattcctatgaacacatcaagtgttaaacaatgtagtacaactcatgcagatttatcatttgtaccagaaactaacaatcaaggtgaattagaatttaaattaagaagtttagaaaatgaagaacatatgattccatatcatcaacatcaacaattaaccccagatttagattctcctaataactcatcaataaataataaatcattagcaatgacatcgactgaaaaaattgttaatgaattatctaccttcagtaatgggtttatttcattatcaccagtttcatcaattaaatctaatagctctggtgatacatcagaaaataataccaatacaagtagtgttaataatgatattgatattaaaatgaatggaattaataatgatgattgtgatagtttagagggagatatttcagattctgagaagaaatatcaatgtccacattgtgattcaaaatttaaaattcgtggatatttaacacgtcatattaagaaacatttatccgaaaaggcatatcattgtccattttataataatgaatcacatgatagtagatgtcatcaaactggaggattttcacgtcgtgatacatttaaaactcatttaaaggcaagacattttaaatatccaccaggtacaaaatctactaaaagaattggtatgatgggttggtgtggaatttgtggtgaaaaatttttaaataatgaaatttgggttgaaagacatattgaaatgggattatgtcctggattacctgatgattatcttaaaactttaaaaattggtaaaaagaaaacaggtaaacattctaaatttcttgatgttagtaatataaatgagagtttacaattagttaatcaaaagaaattattgaataataataataagcaaaagaatgataagattaataaaaatattaaggaaggagaactttatttacaaagtccaccaagtattaattcatcaccattacctgcaatgaatactgatagtttcaataattcaacacaaataaataaagtaatattaacgacaccacaatccgttagtccaaataacggacatccatttgaagtttcaacaatctcaaatatagaatatatgggtataaatgatatgaatgtgaatcataataaaagtgatagtaataataacaaccagttagatactgagacaatacaattattacaaaaacaacaagaattaactcaaataattagtatacttcaacaaaaacgtaaagaagaggaagaagaagaaaagagaagagctataattcatcatatgcaacaagcacaacgtacacaacaaataatgcaattaaagaagatgcaacaatttcaacaaatgcaacaattacaacagttacaaaagatttattcacaaaccaatgatactattaagaataataataataataatagtaattcaaatcttaatacggaaagttcaataaatacattgaatggtgataataagttcaatggtattaataataatggtagtaataataatggaaattacaatattagaccgatacttccattatctcgaagtgaagaaattgttaatagtaatgaaaacgaagaagatttcccatcattagatggagaatttgttggagttgcaacagtttaaagttgtagaataattttttgtgtataatttaagttaaatcaaatgtgtaatgtataatgtatagtatgataataatcaggtaaaacggagatatataataaccgtcaataataattcgtatacgtcgataatagaggacaatacaaattttttaaaattttctcattaaatttaattaatgagcgcgttttattattaataatatcaatatagttaaatttagaaaatttgaaattgaaaagcactatatgtcatataggtatattggattggtattggcgagagatctatttatttccatttccttttcttttcttttcttttttttaaatttcttttcttttgacgtgttgttgttgctgttgcttcttctttatcgtctgttttatcacctttgtattccacatcttcacatctcactcaatttcctcaattatatttaatcccggcttagagtaagtaacaattattcaaatacaattgaatttaagtaccaataataacataataataataatatcaataaagataaaaataacttactcactaattacataataataactccttttacagattgttattttccgcattttttacttaaaataaatttcacatttcaatttttctaattttatacacaggttaaatctcaactaaaggtacatgttcttatcattataagcctattaataataaatttaaccacttaaaataataatatatcaaccaattttgaagatattatacaaaaaatctcaaacttatccatattaataataatattataaaaaaaatactagacgaacataacggaattaataattcttataaccataatcatagaaaaaataaaacatatcttcttaatcaattaaatgcaaaacattattatacaatatataacaatattactactgtttatacagtcaacgatatcaacgtcaacttcccccttaccaactcaaatatcaacaactataacatcaacaaatgcttcaagtcgacatacgaattctgcttccactacttcttattcaaataattctgatgaattttcagttcgtgcaacttctgcattaccaatcttaaaattttttcaaggaaataattatttctttgattatataattgaagttggtgaacctcaagaacaaatggctttaagacttgatttattacaaggtgatgtttggttacctgcaactaatgaatttgttgaatgttcatctactagatcaagttctttaactacaactatacctgttgatactaatcttattccaactataacaagttctgaaactacaagttcaaatgtaacgtatctttatattagtttatcaacatcctctgattattcaactgttactgtcgatatggttgatacagtttacgttcaagcatgtgcaagttcaggggtttataatttattaaattcattaactggtagtttcattgatattacaactaatttattaacagatttggcaaatgcaacttattattcatttgtttctatttcaggaattttcctctcaggtaattgggcaactgataattttattttatcttatttatttgataatcaagcagttgcaattgaaatgtttgatgttccattcgtttatgcaaatttctcaaatgttggtgttggttcattagctttaggttcaactcaagatgatcatgtctttaattataattttatctcaaattttgttttaaataacttaattaaaacaaattcttattctttagctttagatgctaaaaatggttctgctcctcaattaatcttaggtggtattaataaagattttgttcaagataatttaagttcaaatgaaaataatcaatcaatggcattatttgattttgttccagttttcgatgaaactggtacaattattaaatcaaataatggtatatcaaattcaatgcctgtattaccaattttcggttggggtgttacatcaacaacaaatggcgattctttaatattttcttcaagctataatgatagatatgaagtttcacaatatccaaaaccagcagttttagattcaagacattcttataattatattccttattcaacattaattgaaatggcaattgaattaaatgcagtttattcatctgatttagatagatggattgttgattgttcagttgatagaagtggtacaatggatttacatttaggtaattatacaattcatatgccaatttcaaatttcctttatcctgcaacttcaaatcaaacaaatttagttttcaataatggtaatcctgcttgctttttagctttcttaccagattatagaattggttattcacttatgggtgtaccatttttgaaaaatatttatttagctgttgataatgaaaatcaacaaattgcagtttctcaattgaaaaatcaattaagtgatttaaatcttgatatttcatcacgtcctttttcaatggaagttgatattgaaaattttgagaaagaaaataatgaaattaaagttaaaaatgttaatgagactaaaattgaaccaaagattgaaaaaagagaaactactcaaaattcagatcataaaactcaagttattggaatgacaacattatcagcatataagaatacagtttcattagaaagagttgaaacaattacaagttcaaatactatttatgaaacaactgttacaatttcagatgatccattctttacaaaaggttttacaggtcaatcattttatgcaattgaatcaggtacaattccatatgcaaaaagatttgttaatataactgatttaacattaacaattccaagatcaatcgaattaattgattattatagtcgtgggactgaaatttatatctctgatgatgaagtttacttacaaactgattatcaaactggaactgatggtgatgcaacaacaatggttcaaagaacaactgattcatcaactcaaatttatggtttctcatcatatgtttcatcaattagttcaaggagaatgtcaggtgctggttctcatgttgaatttccaattaaattttactcttttactaaaagctattcattatcattaatttgtttccttgcattctttacattattcacaattgtgttgatgtaataataaaaataataatctcataatcataaaaattgtacttttttcccatatttttttttcttcttcttcttcttcttcttcttcttcttcttcttctactacttttaattcttccccagtctactatttttattacattttttttttcttcctgtgtttgtttatatttttatcattcattatgtataatctatatatgtgtcaatactactactattataatcaaacttcatatatcgcttcagtcgcgtctgtgggggtgaaatatttccaaaaatttcactctcactgtaaaactgaaattttaacattgctgaccaaacaaaaatattgagtttctcattggggatgaaaaaatgggaaaaaacatgaattttttgtgaatttttcagcttcatagaaatttttttctgaaaaaaaacttaaattgttaaataatcaataattaaaaccccgtttccacagagctaataaacaaactatacataatgagtgacaagaacttacgtattgctattgtttcagatgataaatgtaaaccaaagaaatgtcgtcaagaatgtcgtaaggcatgtccagttgttaaaactggtaaattatgtatagaagttttaccaaatagtaaaattgcattcatttcagaaaatttatgtattggttgtggtatttgtacaaagaaatgtccatttggtgcaattcaaattattaatttaccaactaatttagaaagtgaagttactcatagatattctgcaaattcatttaaattacatagattaccaatgcctagaccaggtcaagttttaggtttagttggtactaatggtattggtaaatcaactgctttaaagattttatcaggtaaattaaaaccaaatttaggtagatatgatgatccacctgattgggaagacattattaaacattttagaggttctgaattacaaagttattttacaaaagttttagaagatagtattaaaacaattattaaacctcaatatgttgataatattccaagagctattaaaggtccattaactcaagtaggagaattattaaaagcaagagctgatggtaatactaatgttaattcaattaaagatattattagaatgactgatttaaaaaatttattaaagagagatgtttcaaaattatctggtggtgaattacaaagatttgcaattgcaatgacatgtgttcaaaaggcaaatgtttatatgtttgatgaaccttcatcatatttagatgttaaacaaagattaaatgctgcattaattattagatcattatctgatactgatgtttatacaattgttgttgaacatgatttatctgttttagattatttatcagattatgtttgtattctttatggtgttccatcggtttatggtgttgtttcattccctgcatcagttagagaaggtattaatattttcttagatggtcatattccatcagaaaatttaagatttagaaatgaatcattacaatttagattagctgatgcttcagattatatgatggttgaacaatcaaatagttttacatatcctgacatggttaaaactcaaggtgatttcaaattaactgttgaagcaggttcatttaatgattcggaaattattgttatgatgggtgaaaatggtacaggtaaaactactttatgtaaattattagcaggtgcaattgcacctgatgatggttcaaaggcaccagaattaaatgtttcaatgaaaccacaaaaaattgcaccgaaatttactggtactgttagacaattatttttgaagaaaattagatcatcatttttacatccacaatttaatactgatgttataaaaccattaaaaattgaagatattattgatcaagaagttcaacatttatctggtggtgaattacaaagagttgcaattgttttagcattaggtaaaccagctgatatttatttaattgatgaaccatctgcatatttagattctgaacaacgtattatttgttctaaagttattagaagatttattattcattctaagaaaactgcatttattgttgaacacgatttcattatggcaacttatatggcagataaagttatggttttcgaaggtaaaccatcagttgatgcaattgcaaagaaggcagaatctttattaactggttgtaatagattcttaaagaacttaaatgttacattcagaagagatccaaattctttcagaccaagaattaataaattagattcccaaatggataaagaacaaaaatcaagtggtgattatttcttctttgaaaataacaaattataatagtaatgatataatatgaaataaaatacattatacattattatcaattaatcgtttcccattctattcattaatcattaattagtataatttaatatagtatagtatataactgtagtttaatcctttaaataaaagtcaaaaaaaaatttaatatatgcaaaatacaatttcagaagatacaacctacaactatcttcatatccaaatgcataagcaaactgtgaacacgttgatggatagcaaatttgattcatctgtgtgaaaaaagacccaaatttaacgttttttccgttttcttaattttttcactctcactgcttcgcccattttgaaattatttttggtctggcgattttatgttttacaatttgttataatgactcagtatattgatcttttaatttaatttgaagagtcaaactcatcttttattcacaatgactgaagaagttacaaagaaaattgaagaagtctccttaaattctgcaccagtatctgaagaagcaccaattttaggtccagatggtcaaccattatctaagaaagcattaaagaaattagaaaaggaaagagagaaggaaaagaagaaggcagaaaaagcagcccaacttgctcaagaacaagctgcaagagaagctgcagctgctgcaaatgatactgcaaaggataattatggtaaacaaccattaatgcaatcaaagaaggaagatattactggtattaaaagaagtaaaatttcatcattatctgctgcaaatgatggtgaagaagttgttttcagagcaagaattcatactgcaagacaacaatctgctaatatgtgtttctttgcttttagacaacaagatgaaattgttcaaggtttattaaaatcaaatggtgaatcaatttcaaagcaaatggtcaaatgggctgcaagtttaagtttagaatcaattgttttagttcatggtattgttaaaaaagttgatgatttagttaagagtgcaactgttcaagatgttgaaattcatattactaaagtttatttaatttcatctgctccagctcaattacctcttttaattgaagatgcttcaagatcagatgcagaagctgaagcttcaggtttaccaattgttaacttagatactagattagatgccagagttattgatttaagaactatgactaaccattgcatctttgaattacaaagtggtatttgttcacttttcagagaatatttatcaaaattaaatttcagagaagttcactctccaaaattaattggttccccatctgaaggtggtgctaatgtttttgaagttacttatttcaaaactaaggcttatttagcacaatctccacaattatataaacaacaattaattgcagccgattttgaaagagttttcgaaattgcacctgttttcagagctgaaaattcaaatactcatcgtcatatgactgaattcgttggtttagatatggaaatgacaattgaagaacattatcatgaagctgttgatactttggctgatatgtttattttcatctttactcaattaaaggaaagatatgctaaagaaattgcaactattagaaaacaattccctgttgaagaatttaagattccagaaaaaatggttaaaattcattataaggaagctgttaaaatgttaaatgataatggtaaagttcaaggtgattatgaagatttatcaaccgaaaatgaaaaattccttggtaaattaatcagagataaatatgataccgatttctttatcttagataaattcccattagctgttagaccattttacactatgccggatccagaagatccaaactattctaactcatatgatttctttatgagaggtgaagaaattctttctggtgctcaacgtatccatgatgctgaattattaaaggaaagaatgaacttccatggtgttgatccaaatggtccaggtgttgcagattatgttaatgcatttacttacggttgtgcacctcatgctggtggtggtattggtttagaaagagttttaatgttcttcttagatttaaagaacattagacgtgccttccttattcccaagagatccaaaacgtttacacccataagtgtttatttaatgtgtatataaactatataaaccatatatcttcaattattttataaacaattgttctgccatgggtaagttaggttctttaatgcatcaatgtacagttcggaacggtataatgccgtgcgaagtaagtttaaatttctgtgatcggacaattaataattttacgactcgaattattcatggtctctgcatgacattaaacttcgtcagctttctattgttgatcaagaaacaaatatttcaatgactggaaaggaaagataaagatggagatacatctagtgtgaataactctttgcagtttttatcattgaccgataattcagcttttagcaccccgaccgctacgaagaacattggatcagaaagtgtaatcgaagatgatgaatatcatgagaaacataatgatgaagtattagatgctgcacaaggtaaacattcagggacaatatttcagttatggctcagcaaattcagcaatttctgttggtgaaggtgaaaagctgttaaatccacatttctcatatagtgaagaacaaatgttgaaagatgaagatgccaaaatccgtgccttaaatacattagcatcatcacctagaaactctagatcttcatcagcaagttcacatgctcttagaagaccatctatggctgaattcatggttcctccaccaccttcaacattagctgttactccaaaaccatcaagatcaaactctaaattctcatataatccaactacacatgagatgacaccaaaatttaattcccaaactatgggacacttcaccttctataagtcaaagagatccttttaatgctcaacaaacccacaaagttaaagagcatgattttaaacttggtagtattttagcaaatgatcataattcaattaatgacgaaccatcaaatgaattaatcgatatttataaacaaattaagtggtgtgttgatactagaaacaaatatcaaaccgtatctcttcaagaaccttctatgaatccaaaaaatcaagaaggttggaaaatctatcctaatccaccatctccattctggaaagcacaaaatcgtcgtaaaccagaaagtatagataaagaggataatccatatcatagagatgcaagagattttaagtttgaacaatgtgaaattcctggacctgatccaaatgttgattttgttgcagatagtgaagacacctatcaaattgttgatgctaaaacaggtaataaactttgtcaaattccaacaattagagactactatatggatttggaaagaatcattaatattgcatcagatgggccaatgaaatcatttgcttttaaaagactacaatatcttgaagctagatggaacctttactacctgttaaacgatcatgaagaaacatcagaatctaagaaaaacccacatagagatttctataatgtaagaaaagttgatgtccatgttcatcattctgcttgtatgaaccaaaaacatttacttagatttatcaaacataaaattagacactctcctgatgaaaaagttattaaaagagatggtcaagttttaacattgcaacaagtttttgaatctttgaatttgacagcttatgatttaagtattgatactttagatatgcatgcacatagagacacattccacagatttgataagttcaacttgaaatataatccaatgggtgaatcaagattgagagaaatattcttgaaaactgataactatataaagggtgaatatttagctgaaataactaaagaagtttttgacgatttagaatcttccaaatatcaaatggcagaatatagaatatcaatttatggtagaagtccagatgaatgggataaattagcagcttgggttgttgataataaattattttctcataatgttagatggttaattcaagttccaagattatacaatatttataaaagcagtggtttgataagtagttttagagatattgttgataacttattcaagccattatttgaagttactaaaaacccacaatcacatccaaagttacatgtgtttttacaaagagttattggatttgattctgtcgatgatgaatctaagactgatcgtagatttcacaaaaagtttcccttcccaagtaactgggattcagaatataatccaccatattcatactatctttactacttatactcaaatatgacttcattaaaccaatggagaaaatctcgtggatttaacacatttgttttaagacctcattctggtgaagcaggtgatcctgaacatttaatttcagcatatttgacatctgagagtatcagtcatggtattctgttacgtaaagttccatttgttcaatacttatattatttagggtccaaattggtattgcaatgtcaccattatctaacaatgctttattcttaacatatgacaaaaatccattcccatcatacttcaagcgtggtctgaatgtcgctttatctactgacgatccattacaattttcatatactagagaaccattaattgaagaatattcggttgctgcacaaatttggaaattatcaaatgttgatatgtcggaactggctaagaattctgttagaatgagtggatttgaatatgaattgaagaaacattggataggacatgaattttatctcgatggtgtggagggtaatgatattgaaaagacaaatgttccagatattcgtgtctcatatagaaaggaaaccttacaaactgaatttggtttgattgattattacactaagttaggatctgaatagattaataattttcaactctttgaatttttttaaaatgggtaattgtatagaaaatatataaaatctaatgatatataatgataatgctacagttgacttatatcgaaaccggttcgatgcttgattcgtaaccaaagattctgtaattattttcttcaattcgtttctggatatctcgtttaaacttatcgccgtacatgtcatattgaaagtttgatacatcaattggagtttttaactggttgatgttgtaaaaccacattctaatgtttttgaaaacaccattgtcataaggtttatcgtttattgttaatggaactatcaatcttaagtttggttcatgaggatgttgaacattcacatatgatgaataatcatagaaattttcattatttttatcacctttcttaagtgatcttttccaacttaatctatccaatcgttcaattgttgtttcgccataaaataaatcacttattaaagttaatttccaattgtgcaacagatattgataatgcccctgtaattatcacaaatacaatcaatgctgaatgcattgaatgttttataccactataaacaaccactgtaatccatgtaaatatcattaatagttctatggacatcacataaatgataaaatatccatagttttgtttccctattgtagaacctacgaatgtgcagaaatgatcaaaccatggtatacactgattagtaactgaagaatgatggctcctgagtagttttaatgaacagcattcagagcaccatgagggcaaaccatttctatcacaatcaaacattggaggtggttgtatcattccaccatcttcttgggtatctagcattgaaagagatgaaaatgtctcatttttatgctcaaagttcaacttacttccattataaacaaattttgacaaactgtaaggaggtactttaaccagaatgtgacccggtttccttattaaaagtaaaaaccaaaataaaagagtaataaaccataatatattagctactgttatgaaagcaatcatagcatgtttattgccataaattttatagacatgttggtaagagaaaagataggaatatgcccattcactgaatgccatgtaaagaatcacacatgtgggcactaacaacctccagtatgaattctttgttagtatagtcatatcattgatgtgctgttattcccttggcgaaagaaagaagaatggctaagagaattaaaatttcaatgttcgttaacttaatataaataaagttgatgtaaatatcgttttttcatgaaaatatttcaattactatacaagagtttgtgaatagtctatgaattgcagtagatatacagtgctaactagaaaactataaacctttaagctgtgtaatagatacaagatttcgactgattgaaggccagttattctctaattttgttgatctgatctttaatttataatttttttctaatgccttgatagtctgtaatctcttgtaaagaatcatcagttatatctaggaattcaccatcaattatagattttaaatgctcttgttgtgtttttatgaaatcattatttaaagtttcactttccactattttaacaattaaaatactgtttgaatccttcgatataccaaatttattcaaacaatccatgatatttttaaacggtgataatgaatagagtaattcagtatgtagagttcttgatttcatgtttccatcatgttgactcattacagttttgtaaaatccactgtataattgctctaaactaactacgttcttagcgtttataaacccatagtcgtaatctttattggcttttattagattttccttgatttcttgacaattctttacatttgatgcaaggaaacaaacagccttgtatttcttgtagacgggaacttctatctctctgaacggtattgcagatgacattattcttataaaagatacttctacttggatatctcaaaagaaaaaacttcctgcttgtgaacatgaatttgtgtcagttgaaactgaaattgaatctcgcagattaatttcactgtttcttcctttatttcacttttgtttattttatacgttgatcatggataatctctgggccaatgctggtacacacgaagagaatgtttggggagacaattctagtagtattagtgtgaataacgatgaaattgatgatgaagttgaagaaacttataatgaaaacattaccccaacagaaagttctgatgaaaatgatgatgatgtcagtgaaatggtgaacgtggaagattctgcaaatagtgtatcagtatgggctgagaatgctgatcttggtgaacacactgataatatatgggttgcagactcgaatattgaacatataagtgataaaagttttgaaaagataccatcaattgatacaaataaagttgggcagtcggtaatcagaccttcatctaatgaaaatactgatgatgatgaacaacacatagaagaggaagtttctaattttcaagatgatgacaatgatgaacgatgatgcagattttggtgattttgaggagattgcagaaattactattgagtttggaaagccaattgaaagtataatctcccaaatatttccaaattcagagaaccgtatatcgttgtcaaaagaagatattaacaaatcttagctttcttcttgaaggggggaataagccaatgaaatgttacaatacaattactgcaagcaataggcagtttttcattcaaaacttggaagtaatgaacacacatcaaagaggatgtatgaacaaatcaataacccaaaaggaattagttagtatcactaacgattgggtttttagtgataaaggattttatagagaaggacatagaaagtccaactctcaattatgggatggaaatgatcaaaagaataatatatttcgatggtcaagtaaatttgaaaagaatgagaaagagaatgaaaatatcgttaaggtagagaataaacctaacatatctcaaaagcttttgaactctgcttacatggaagctagaaaattaattgataaacgacttgatcaagaaaaggaagaaaggattgcattagaaacgttgagaaaagcaagagaaaaaaggctacgagaagcaaggattaaaaaggaagaggagatggccaaatataaacttgaatacggtgataaggtcacagatagcaaaaagaaaggattttttggaaagatgtttcaaggtaaaagtaaaatatcgaaagatcacatttcacatactaaaatagctagtcctgaggcagatcaagtttccaatgatcatgatctttccttaaaagagatgatggaaaaggatggatacactttctctagcactggaaataaaaagcatagttttagaaagcgtaaaggtcatgtgaaagacaacaagattgacgatgatgatgatgatgatgatgatgatgatgatgaaaacgatgatgatgatgataataatgttaattttcaacaaaattatggtttactaactgaaacttgtttcagcatcaggttttcgaagagaattttcagaatgatgatcatgatttgtttggtaataacataaatgaagaatttaaagagctagatgaagataaaataatgggaaacaaaacaattgagtcaacctcacataaaaaagaacaagcaattacagaaaactatcgataataataagcatgacatgggtgatgattataatgataatgaatttggggagtttgcggaagtagatgaaccgacagattcttcaaaccaaagttttgaaaattcaaatagaaacaataatacctctggtgataaaagtgtcaacttaattgatctatagtcaatttaaagagcaagaaatatcatatttaacatcgtatctatttcagtagaaatttcaaaggattattatttttcaatttaatcttttttgtatcatatttacagggaaactggaactatagaactttatataataaaaattagaaaacaatatatgcggaacattaggatcagtttgatctagataattatttagcttcttgctttgggaaatagtcataaaaccaaatctgtcttggaggatattctgttggaactctaagttctaatgggaatcttttaccgtattgatgttcattagcaatttcgaaaagttcagggacttaaattttgtaattcactgacagcttctttcatagattcgtattgtttttgtaaaagtgtttcattttcttgtattttagcttttctgtaatgtgaccatgccttcatgacagttttatgtttaacataatcttcattacaaagtttcaaaagtcttggttgttttcttccagctgacatcacagaaagttgactgacaattctttcaagttgtgggttaagaccagacttgtctcttttgtatctgacctgttgagtaggtttaatgtgtgatactacccttattgcagctctagatgtgtacattgtccttgtgtaattatgctccttagaataaccgtctttcttcagactcttcagtattgtaagaaaagtgaaatttcatgaaagaaaaactgtatttttccacaattagcattttttcaatttttatgtgaaggtcgctaagacgagaatttttgcttaggttcatgataagatcaggataatgtttctaggcatggtcaacctgaatttctatcaattcagcaaggacaagaagtagaccactgcatggatttggaaaatacatctgattcaagtaaaactaatccgttctatgaattagcgttaaaggaacgtcgacataatttgcaggcaaatgatcatgagataaaaggaaaccagcaaaatgcggataagcctccattgaatgctaatccaacagtcgcaattgcaaataatgattcaaacacaggagtacataattcaatgaatgactacacaaatagtcataattccaaggtagtagaaaatgaaaaaaaatgtgataatggcaaagaacaaatatcagttaactcaaatatgaatgattatacattaaagaatatggagtcccttaatagaaatgaaagtgattatagtgatagtgatgatgatgatgatgaaaatgatgaattgcctttgatggacatttctcctcttgctatgcaaaaacttaaaagtacattatcaaaatcatcagtttctttgaattctacagctaatggtagtgttgcatctatccctgtaacatctgtcggagattcaaatcccaacaattataactcagttgaaaatacaactactcaatcttcaaataattcaaatataattggaactatctcagcacctaaaggtaatgatgacatacaattgaataatgacaatatcacaaataaaaccaatatctcctctgttaatatacctcagagagaagaaattccagctcctgttttacctactagaccacctcagctgcctgaaagaaaacagaggaatccattctacaaaaaggtttccagtttggatccggggtcaatatcaacagttgcatcacattctttccttgtcaatgcaaactcacccgattatgctgaacgcaaacggtcaaattcatatagtagaagacatctgcctccaatatcaccaacgctccctgaacgtccatcaaataaacttactattactattccaaacgatacttcctcagtattttcaaatgatcttactccagttgaatcgaatacccccaaattaactcctactgaatcatttgataatattaaattacctgatactcaatcctcaagtgaaacaatgtattcaacttctgttttgaaaaatacccattcaactccaatcattaaaatatcgggtatagaagatgaaataaactctgcaccaccactacctaaaaagccacaactaccaaagaaacctcaaagcttcagcaataacaaccatgcttcggctcatgaattgttggagaattataaccgtagagcttctttgtctagtgtcaacagttcggtcttttcagtgaataattcattggataatgacttggatttacaaagtttgaaaaatcttggtatcactgatgagatgatcagacagcaaaaagaaatagaagaacgtattgcggaagaaaatagatcatcaacaagaaggggatctaccgtgtcacatccagaaagtagttcatcatttgcagatagatccgaattttcaaatatatcaatcaatgaaaacagttcaatgcattcagatcaaagtgaggaattacctgatgatatatcacaattagaaataccaactaacttgtcaagaagtcaaagtttattatcgaatacaggaaattctgaaacacagtccattcaaagtagtagtattattccagatcctgttagtttaaatgcagacataactgaagaggagtttattagtttattacctcctgttccaaagtataaaactattgctgatgaaacagaactttcagtaccaaatggtaaagcaattgatattgtaatgataaatgataatcaaggagaagaaaaaccaccagaatatactcctgtatctgaggctctaaagaagattgttagaagaccacaattctctcaaacaggtggtgataaccaaagtgtaagaagaagagaacaagagcagttacaacaacaacagttgcagcatttagatcgtttaacttctggtacacacggattgccttctcttccaccaagaagaagaaattccagaaattcttcaagtcgatctttattaaatagaaactacccagcaatatagctagttttcttgatttttttgtgtagtattgtatctatttgtaccattaataatatatttatgtaacttacatgctataaaataagcaaaaaaaagtaaaaagcacgtttttttatagaataactgagtctttaatcaaccaattttaatatttttcaatttaaaattctctaattgagttcaatgcaacattttttatcccttttttgtgatgttttttctgtgttgcaattcaataaaaagatattttaagtatttcaacaaaaaataccaacaaaaaagccagaaggtaaattttgttgaaaaaagttacaccacggtaattttttttacattcattttattaaaatacacaaatttctacaatttaattacatgtactgatatattatttatgctttatcaatttaatatatcttaatatactaaactaaaggtaaattgagttatttatgcggtcacgtgaccaatatgcagcaactgtatctattattgtaggcatattactataacaatctccgatatagtgtaatggctatcacggtccgctttcaccgggcagacccgggttcgattcccggtatcggaatatttttttgcttttttcaaaacgataaaagtgtatttaccttaaaatgaaataaagtcttggtactcaaaaaacctgtttctcctggaaaaagactttgattttttagaagtcttcacactttgatagcatagctgtacccaaggtatgatttcaagttactgatagaagatgaagactcagtgtaaaatatcggcatacattgatattcctagccgcaaatttactatggataaggagcgccattttcccaaaagagtaattgccgttgacgataagcgtattgacacttcttcgatatatactaaatttaactgtttctattatactttgaaggtggataaagtccaaatccaaaaaagtataaaattgggaatcattccttttaatttcgtaagtgaacttgtattattttctttttttttcttctctttccattaacatcaaacaaattaaaaataattgattataatgactgttgaaactaaaacaaaatcctatgttttccaaaagaagatttctgaaaaaggtcttatctgtgtcggtgctaagaatgatggtatgtacttagttttagaagatccagcaactggtgaacaaaaagttgtccttgatggtgtttctggtgcagctgtctgttccttaggtcacactgatcctgaaattaccagtcaattctctaaatgggcatctgaaagtccatataccttcggtgcatactatggtaacaactctgctgaagatttaggtgaatttatgtgtaatagatccaatggtgcatttgaatcttgtctttggactcaatcaggttccgaagcaactgaaaatgcaatcaaacttatgagacaataccatttagaaagaggtgatggtaagagatataaaattatttcaagattacaatcatatcacggttttactattggtgctttatctgttggtgatggtactagaaaaccaccttttaaaccaattttattaagtgatgaacaaactccaaaaatgcctcaactttatccatacagagattggaaagaaggtatgactgaagaagaatacactaatcacttattagaacaagcagaaaaagttttcatcgataacgatccttctaccatttctggtgttatcgttgaaaccgttggtggttcaactattggtactccgactccaccaaagggttatttagatggtttaaaggcactttgtcacaaatatggtgcattattcatgttggatgaagttatgtgtggtttaggtagatgtggttacgattttacttggatgcacccagaattcggtttaactactggtggtccagatcttttatctgttggtaaaactattggttccggtttcgttaccttagctggtttattcttttctcctaaattctgtaaggacattcaatgaaggtactggttacatcatgggtggtcaaacatatcactcacatgcattcacttgtagagttggtttagcagttcaacaaaaaattgttagagacaatttagttgaaaatgttagagttgttggtggttacatgaaagaacaattaaaggaacaattaaaggacttgtaaaattgcaggtgacgttagaggtgctggtaacttcctttctgtcgaagctgttaaagataaggcaaccaaagaatcctttgatcctaaattagctgttggtccaacccttcacaagagaattttcgacaagggtgttattgtcatgggtgcaaacggtactaccggttatgaataccaaggtttaacagatgttacctgttttggtgaccacgttaccatgggtccagctttcacaaccaccaaagaacatgcagatattattatcaaggccgttgtcgaggctttctacgaacttgaaaaagaattattataatcttgtcctattctttctagtttttttataatgattttccttatttaaatatagcaattaataattttttttgaaaatccaatcaatctaattttctatacagttatcttatttcttttcaggtaatcatttattctatctgtaacacttatatcattccacaattcatttttatcagaatcataactgacttttggcaaaccatattgctcaatacatgcaccactagcaatcgttgcatagacacatgatttcctataatctctatcatatttcacaaaggcagttgcaaatgctccaacaaaagtattaccacatccagtcggatcaatcactttattctgatccccttcaattttttcatgaaatgcaggaaaccactcaatggctttatcttcacttcgtatataaaaacttccaagttttccacaacgtagaactataccacttccaggtttactcatgtagtcgataaactttctggctatacgttcacaattgatcttatcagttggctctttctctccaaaaaaggctgcacattcagcagcatttggagtcagaatatcaatttgagataatattttaattgtagcgtccagatattctggcgaacaacaatcgggtataggctcccaagcgataacaacatctttgtgagtttctgaaacagcactcaattcttccattaattcagtgcatctattcggagagcaaacaaaatggaaagatttactgtttaacatccatggataagtttttagatcagtaattgtgactctttttttaggtgttaaatacttaaatgatctgaattcattttcatcataaccattccaacctctggtacattttcttgaaaaatcaaatctgaaaacccctccagtattccatgattttaattcacttaatatttcgtcagggcaatcattacctatatcaattatccaagcacatttatcagattcctttgatcctaaaaccattcttgatccgcatattgcaaatgttccaccacctcctagaattccatcaattttcaaatccgaaaagtttatttcatcaataataaacatccccaaagatgtaaacaccggattagaatgcgttcccttgatcattgtgcatatatgctattccgagaatatacttctccaacttcaagataaagagttaacgttgttgaggcaacacaaaaatttcatggcacaaaaaaattttgatttcatgttaaaatttgctggaatacaattgtagctttcttgtcttttgtactttacagatcaacatgcatgaacaatgagtgaatttgatcagaagaagaaatttttgcttaaagaaattggtttgaactccgaagaaaatccagatgcatctccaaagggtactatagattcattatgtattccattaatcactatgataaattctcataaagatatggttacaacatcttcatgttcaggaagattgtctgtcttccttgaaggttcaaaagatgttaaactagtagatgaaggtactagagaaaatataaagattggtgcaaagggtgatggtggtcattggttgtttgtctcccatgaaaaagaggaaatcaaggaatggtggaaaagtgaaaatattaagtttaaatataaaactgctatcaaagaaggagaatataatccaaacacaagatacgttttgttcaaatatgaacctttgattttacatgttaaatgtcgtgatttcagttcggcttctaaattatacagcaccgccatgggatgtggattccgtgaatctggtattggtgccaataataatgttgcaataagaatttccatcagattagacattccaataggatttttagagaacgagactgatgatatcttatgtacagtagatgagtcatacattaaaatggttactaagcttgcatatgatagatttttagaaaatgaaagaaagttggatttactttatgaaagaatagaaaaagaaataatcaattctgtttccacaacagaagtcaaagaaacgaaggaggaaagaaaagaaagaaagatgagagagggtcttgctagaagagacgatgtacgtaagttaaaggaagagaagagaaggttaaaacagctacaattagaacaacagaagagtgaagagggaagcaaaactaacgaagaataattattatatttatagacaactattataaataacgatctgtatattagagtttataaggtactgtttccttaaggaagttgatatcagttatatcacgagtggtatttttggtgactctccaacttgcagcagctggatcaaccattttgtcatttagtcttgatgtccatttccaattttccttcatatcactttcaaggttatcatctaccatttgaataatgtacttaccaatattaggaaagaatttgtaaccatgaccagagtcaccagtggcaatgtataagttagtgaatcctggaactttgtctattaggaaatgtgacttttctgtatccccataccagcatactctagatccaaacagattatgacttttcaatgatggtgcatatttatttagcagttgacgaaaatcatcaacaagctcttcaggaattgtatccgtaggattttcattgtgatatcttggcaatgatatctgagtattggaattgaatggatcatttatacttctctttatacctcgacctgttaagcaaagtttcattatctttgtcaaaggatcaggaggaaagaagtaaccaatttcagcatcaaacaacactggaatgtttttgtaaatatcaaattcttcatcagttaactgtatatgtgtaacaaaagctccagttgccgattgttgattctctaaattcaatactgatccagaattagcacccatagccaatatcacagtacttgcactatgagtatatcccgaggctgtaacgataccaacttcaccatttgaataacgtttaacagaaaccacatcccctgattctccaaaaacaaatctgactctaggatgtgataagaggtattcatagacatctttaattgtttgagctgctaatcctaatccaccttctggattatacttaacttcttgattagaaggaacatcattatctttaaatccttcaaatttgttaccaatttccaaaccacctttataaaactcatattttaaaccttcattaagtgaacgtaaagtttcaataccttttctttcaaattccaatctacccttatgattcataggtgaaattagtatacgaccacattcattaaatgattttttgaagagaggatctgatctccaaagatgaagtgcttcaatagccattttagcatacatttcatcattatattcacatcttataattttattgaaatcattagcagctgaccaaggggaaggtggttcatatttatcaagaatataaacaaatttcccctgttttacagcctctaaagcagtcgataacccaaatacaccacaaccaacgatcaaaactggaccatccaccatatttgcagctaaaacaacctataatgatcactgtaaagctttgcttataagagaagaaaatggtttcaacggtgttcaagataagagtcgctgatatgaagatcgggccgtttcattggtttgatttttatttctatttctacacaattattaaatattaagtattatattaagtatttatataagatattggacagcttatttacttaggagcagatgcgtctgctggagttgactctttttcaagaaactctgtccaaagcgatacaaaagattgtgaactagtttcagaattttgacgatcaggatgtggtacctcaaccacactacttgatcttgatgtaaagtttcctgatgatataagacctgcatgtctcttcttttcatcatcccaatctaaaaagtttgctaataattgtaaaacttcaaattttttggtatcacctcttgggatttgtaagaaactaataaataaattggaaacaagttctctatcaacagtttctttacctgtttcctttttaattagttttaatgctttagttaaatgttcatttaatgtgaattgtttcatgtcttaatttaccaatgagtaattgtttttcctttaagttattctctagttctggtaatttactcaattgattattcttctcagctatctctgattttagttcattgatttcatcagtaaagtcatttaattgattaactttatcttctaattgtgatttaacattagagacaattttctcattttcatttttcagatcttcaatctttttgttcaattcaacaatactttgcttaagtttagaatattttgcctctaattcaacattttcattttgactattttcaagctttatttttaaatcattcaattcatgatttagatttgttttattcattttttcttcttgcagtaatatcaaatattcatccaaattagattttgattcccttaattcttttttcaataatttattttcatcttcaatttttttgttattgttttctaattggaaatcttgagtttctaatgtgtttttcaattcagtatttttatctgtaagtttatcacattctgagtttaaattaacaatttcagaattaagctcctttaatgttttttcaaggtttaaaattttggtattggttgtctcaagtttagccttcaattcaacattttctcgttcagttgtttcaagtttagattctgattctttcattttagtaaatatagttttcatttgtgagactttactgagtaatgtgttataattatctttatatttattactttcttcagtctttgaagccaattgtcgttttaactcatctacctctggagattcacctaagggagcctttctcttcaggtaatttgacttcttcagttattgtgactatctttttgtctaaagattcaatcttttcatctttctccttgattatttcttcaaatttaaagtttgattcctctaatctttttttcaaagcttcaatctcctcctttaatccattgttctcagtttccagtacctttaaatcatcattatcagtatttacagtgccattcacaattgatgattcttcaatgctctgtaccttctttgaccttctgccaaaacagcttcttcctcaactggcacttcttgttcttgatcttgtacttcttcaatatcatctaccttcacatcattctcaagcacagtttccttagcttcattattttgcttcttcgatttcttcttagaacctttccccattgtaattgctctatgtactatacgctatatagcttccaaggtgttgttccttcgttgttaagaacggtgaagctggttgtggaaaatcgcacttttccatgggggtttacacgtataccaatatttttttcattttatcatgtttttccttgatgtttattaagtgaaggtagaggatctgtatttggtacatatctggtcaattaattgatatataacagtcagcatggatgtttctacggtaattgttctatttgtgggtgtgttgataagattgggaacattttatttagtgcccaacttgcctaaagtgctagatcaatttgtcatgttttcaacacctgtaaattcatatagatcacttaatgaaggtattttccttttatctaacaatttgaatccatacactaatggtgaaattattcatcacccaccaattcttctttggttgtttaaaatcttgaaagaatcaaatatagaggataattttaatactgatttattttattcattaatggatttgttaatgtgtttacaattaatcaagataaataggaaagtcaatgggaaggatggattctccttcattgaaaattgcttgctttcatatgtttaatccatttacattattaacaacattttccaaatctacacacattattcaataacttattagtcatatctgttagtagttgtttagttcaagataaatttgaagcagcaattattttattaggattatcatcatatctcacatattatagttggtatcttttaataccgatttgttactatttatacgtcaataagggtatttctaaagttattaaaactataattttattttcattaacattatctgttttaataggaataagttataaattaagtgatgattcatttaattttattaacttatgttacagtacaattctcagatttaagaagattacaccaaattcaggattatggtggtatttttttcacagaaatttttgaattctttaatgatttttatcttgcagttttcaatatttatggattaatatttgttttaccattatcaattagatttattaaatcatatgaaaagatgaatttattatttgttttatggatttgtgttggtttaatcaattttgcaaaatcatatccaattttcgcagattatacattgttttattcatcaattttcttgttcaaaaaatattattctaatttgaaatttagtccagtaattgattatttattcctatatgttgttttattacaggctccaactttttatgttgtttggatggtattgagttcaggtaatgctaatttcttttatgcaattggattaacattagcattgttagaatcaattatattaagtgattttatttggtcatttattcaatctgagtattatttaaatcataaattggatacaaaggcagataatgtacctccaaaacttactcaaatttaatttcgaaaagctattactatagatatagattttgttatataacttaacctttattcgtctttttacataatttataaatatttttcttttgtcgatacatattatgattatattactgaataatcattcaatcatttgtttcgtgaactgtaatttaagtgtctcgatctgtgacctatttcattaaggttagctaataattcttccatcacttttttactttcactgatttcattttcacttttctttaaatcattctttaacgaacttaaaatattctcctctttattaatttcagctattatcattctttaaatcttcaatttttatatataattcttcattagattcttttaattttattatttgagattctgattcaatagttgatttctctgcacgttctatttcttctttcatatatttattttcatttttattactatccaatttaccctgtaagttttttaatttcctctaataattcatacctttcaaaattcttaaacatttctttattttctgaattattactatcaattgaggaatcttttaatttttgaatattatcattataatcttttatttcattctttataatttcagttttagaagttatttcattaatttcatcatcagttaatttaagtttttcttcattctcctttaattcattatccaatttttcataagtttcaatcattatatcaaaattttttatccttatattattaaattttttaaaactatcaatttcttcattaattttaattgttttagttaatgttgtatcaaattgataaattaatgtatgagttgtaatttcattttgactaacttgttttgatataccagttaaattttcataatctttatttaatggattcattaaataatttttctctaatcttttattttgataataattttgtataattggatttttctttgaaaatcttggttgaattatatgattaatcattttagttttaccaccaaaatatgaattaaaactttctttaatatcttgtctattttcttcttcctcttttaaaatttcttcattatcaaaattaaatttaacttctgttaataatgatctttcaacatcttttgaattaaaatttcttattggtggtaaatcaggtaatggccatttattaagtaaaggatttgaaaaataatctttaatgaaaattaaatttttagtatatgcaggttttaaatttgaaggtaattgaccaactctatctcttaatacaacaacagcagcagttattggtcttaaatattcatcaattgatcttgaattagtttgattttgaaaataaagttctatatgttcaactgaataaattggtattaattggaaaaatttagttttcctaaaatcaattaatttatttaaaaattgattattttgatcaatatttgaatcaaaataaattataaaattcatcttttttttaaaattatttaaattagtggaaatttccttttcatttaaattttcaaattctgatgggaataaatgaatatttaaatttaaatttaaatttttcttttgatttgctgatgaatctcttaatttaatacctgaatattttttcaaattacatctatgtccaatacataaagcatcaactaaatccattgctttacctgatctaacaataattgcaatatcaatatttttaccctttttagatttatcatttttatcaattggattataaattgaatctaattgaattaataaatcatttaaaatttgaaatttaccacttgtttcagctaatctattcggtaaatctcttgttgttaaacttttcgggaaaaaatgattaattaataaataaggatgtaaacaaactaattttatatttgaaatcattgtctctaatgaagttattataatttctttacgactttcattcattgaataccataatttattatctaatttttcgaaaaatcttaaaatatcactataatgtaaagaaattatttgatcaactaattctttttggaaatcactcatgggagttgcaattttataaatatttgaattttgatattctggatcaattttaaaatgattaacatcaacaatacatggttcaggttttgcatctaaaattcttagtaaatccatatttttttatacttatattatttatccgaagttgattgaaatttatttttatcctttttttctttgatatttattataacttatgattctttttcttttaaagtaaatgactttctatctctatctagataactactttcgataagttctaaagacaatactttataattcagatagaagataaaagaaagtataataaggaaacatgtgaaataaagtggtattaaagttcatccgcgatttaaggtgttgatgaaattaatcattgccgtttaagttaatatacagtacagtataagagaaggtatagagggtataggtatagaaggtatagtcatagaaggtatagaatgagtgataatagtttaacagcctgatgagattagtttatatgatagacagattcgtctttgggggatggcagctcagacatcattaagaaatgctaatatattagttattaatatgagtggagttggagttgaaataattaaaaatttaacattaggtggtattggtaaattaacaattattgataataataaattaaaggaacaagatttaaattgtaattttttcgttgaaaaggatcaaattggtgaatttaaagtaaatgcatcaaaattaaagattcaagatatgaatccaagggttaaaattgaaattgataataggaattgggaagatttagaaattgaagaatttaaaaaatttcaaataattatatcaactggattaaattcaaggcaaatatctaaaattgatggaattagtagagaattaaatataccaatgataacatgttgtgttcatggtattaatggttttatatttaatgatttaattaaaaatttaagttggattaaagttgaatttaatgaaaatagagaaattggtgaatttaatttagttagtaatatagttaaaattgatgaaattatagaaaatgataataaatttcataaacttttaattgagaataaatttaggaaatgggatgaattaaatggtaaatttttaaatttacaatttccaagtgataaaaagaaaaagaagaaaattaatatattattaattatgattttatcattattagatatgaatgaagaattttatggtaaagatattgaagatgttatgattgatttggaagaatttaaattacatattaatgaaaatttaaataaatttgaattaccaaaaagtttaatagaatttgaaaatgaaaaatttgatgaatatttgaaaatatttattagaaatgcatattgtgaatatcaaccaagtaattcaattattggaggagttgttgcacaagatgtaattaatacaattgttcaaaaggaacttgcaattaataatgtttcaatacttgatggatttaatagtgaaatgccagtttatatattatagaatatttatagagaattttattaaattttaaataattttacacttctatcccaaccaccagtaaatattgtaagatctgtattattattattattattatcatcattttctataatttctaatgacataattttatctaaagtatttaattttttgaaagtaatccaattatcacaagaagttaaagataaattaccatcataaccagttgataataaagtttcattattagaatttgtaaatttaatatttgtaattaatttattatgagagagtacattagataattttttcatcattctaatatcccaaataattaattgattatcagaaccacctgaagctaaatgataaccatttaatctccaatctaatgaatgaattgaattagtatgataatttaaattttcatttaaatttaaaattaaattacctgatcttaaatcccataatttaagaattgaatcattaccagcagaagctaataatgaaccatcaggatgataagataatgaattaataatatctgaatgaccttcttgagtaaataattcatttatttgtttcaatatcccataatttccaagtaaaatcagatgatgcagatgtaaaataattataagttggatgaaattttaaatcattaattcttgaattattatgagcattaattgatataatatttggaatttcatcaaattctttattaaatggatttaaaattatattaattttaccatctgaaccaccagtaaataatgaattattaatattattccaagttgatgataggattttttcattatttaaattattaaaagttttcaaaattgataaatcaaatggatttaataaataaacattaccattccaagaggatacagctaaggaatttaaattattagaataagaaattgaagatgtaaatctatttgaaattatttgagatccctgtaatgataaatttgataatttattataaatggaacgtctaaattttaaattatttaaattattaaaatttttctgtaaatcatattgtaatttaagtcttttattagccttttcaaatgaataattttttatattagaacgaatgttgaataatatatcaggacctggagtatagaaatcttcattatcatcaatatcatcatcatcagaagacatagtttagtggaatgaaatatgtaccttttaatcctttaaatcttttatcaatctcagattataatagattcatgcatgttattaaaatacttagatccttatatccgaaaagtatcggatataagaaatataaaatattacataatcaaataaaaggcattacgtaatacaaagattacgtaataaaaataaaaatatccgaaagtccgggaccaattacgtaacaataccttacgtaatacaaagcctgtcaaaaaaatgttttttcggagttgcgggcaatgaaaagttgaaaaatttaggatattgaaaacattaccccagattttaagtattttattaaataattactatatgtgatgtaatcatccgcatatccgggggtgtctatattgaatcatctgcctatacgctacccattgaacctattcctaaatactcatcttcttaatttactattgccattgcctattgctccccccccccccccccccccggttatccgtttttcacttcattactattattaattatcattaattacttttttttttttataaaaggtaactatttcctcttattttactttcaatatttgtatcattcccaatattttttcttctttttatcatcatcaaaagtcaaaacaatcaaaaacaaactatcaaacttacaatgacttacactcaaattaatttagatgaagaagaaaaagctttccaagctgaagttgaagctgttaaaaaatggtggaatgaaccaagatgggaaggtattacaagaccttatactgctgaagaaattgttatgagaagatcaactttacaaaatccaaatgcttctgatgcaatggctaggaaagcttatgatttattaaaggaacatgctaaaaatggtacttcttcaattactttcggtgcacttgatccaattcatgttgctcaaatggctaaatatttagatactgtttatgtttcaggttggcaatgttcttcaactgcttcaacttcaaatgaaccttctccagatttagctgattatccaatggatacatgttccaaataaagttcaacatttattttatgctcaattatttcataataggaaacaaagacatgaaagaatgtcattagtctaaggatgaaagatcaaaattaaattatattgattttatgagaccaattattgctgatggtgatactggtcatggtggtacaactgctatctttcaaattaactaaaatgtttattgaaaatggtgctgctggtattcatattgaagatcaagctgctggtactaaaaaatgtggtcatatgggtggtaaagttttagttccaattcaagaacatattaatagattaatttgtattagatcttcagctgatgttttcggttcatctcttttatgtgttgctagaactgattctgaagctgcaactttaattacttcaactattgataatagagatcattattttattcaaggtacaactaataaagatattgaacctttagttgatgtaatgaataaagctgaattaaatggtttatatggttctgaattagaaaaaattgaagcaaaatggattaaagatgcaaatgtaattcaattttatgaagctgttgaaattgcaattaataatgattctaaaattattgataaagaatctgcaattaaaaaatttaattcaattgttacaccattatcatgtcattcaattaatgaagctcaaaaaattgcaaaagaaattttaggttatgaattatattttaattgggataaaccaagagttagagaaggttattatagatataatggtggtactaaatgtgctgttaatagagcaagagcttttgcaccttattgtgatatggtttggatggaaactaaattaccaatttatgaacaagcaaaagaatttgctgaaggtgttaaagaaatttatccaaataaatggttatcatataatttatcaccatcatttaattggaattctgcaatgactccagaggaacaagaaacttatattccaagattatctaaattaggttatgtttggcaatttattactttagctggtttacatacaactgctttagctgttgataattttgcaagagattttgctcaaattggtatgagagcttatggtcaaaatgttcaagcaaaggaaattgaaactggtgttgaagttgttaaacatcaaaaatggtcaggtgctgaatatgttgattcaattgttaaattagttacaggtggtgtatcttcaactgctgcaatgggtgcaggtgttacctgaatcacaatttaaataaaatttgtcgattatattattatattatagtaataataattattgattagttattattattattaatgaaaaaaaaaattgttaatgatatttccccttcttctttatttcctatcttcttatttatataaattatatcttattattatgtattcaattcaaaacaaaaattaaagtaaagaaaaataattataatgatcggatcatgaatgcacatacaaaaaaaaattattgatgaaactaatttttcacttattttcatgtagtagtttcttttagcaaaatcctgtatatagaacaataatgttaagaataacatcacaatataataaatcatacataactcaactaatagctatacgtagtattagaactagagttgcgatacccataaaaccaatagaaaaatcacatataaaagaaccatcatcatcatcatcatcatcatcatcatcatcatcatcatcatcatcatcaccatcatcattaataaatgaagaacaacttgtacatatacctactaaatcaccaacaaatccaagattaagatcaagtagatttgcatcatcaacacagaaacgacaatctaataatattgcagataatttaatacaaaatatgaaatttaaagatgcacaaacaatttcacaagaattaagggaacaatttattaaagatggaattgatattgatgataaatttattgaagaaatgattaaagaatctgagaaagaacaaaatattgtaatgaattatttagaaaatcctaaaaatacagtaaataaattaaaggatgaagaatttcaaatgtatgttgaatggttaattaatgatggatttgatagaattaatttacaacaacaagatttatttaaaaaggaaattgaattacgtgaaaaattaaatgaatttgttaaagataataataataaggaagatcctgattcattaacaaatgcatttataatgacacaggaaatgtctaaaattcaatcaaaatctgcattagataatttaccaatttttttaaaacatttatcaacattaaataataaagaattacaagataaaatatcattagatcaatattctaaattatatgaaatttcaactcaattattagaatcaaataatagagatttatgtatttatctttgtggtaaattattatattcttcattaattaaaaattttggtaatagagcaagacctgatccaattaatgaaaaatttttcattgaaagttgtattaaatataacgattttgatagagcaattaatttatattctacaagagttgaaaaagatgtaaaagatgaaagattttggtatgaacttggagttacaatttatttaaataaatatacttttaatacaattgataataataataataataataatactaaagagataaataatgaagatttaaatattgcagttgaattaattcaaaaaattattgaaagatgggggtatattaataatattcaattaattgaaggattaaaggcatgttgttcaagatctaattttaatgatgcatggtggttttgggaagaaattgaaattaatatgaatgaaattggtgtaattaaagaaattaatatacctaaaagtaaattatatgatgaaagtgaacgtaatgaagttttcaattattataatagaattgataaagttagctttaatggtataattgaatgtattttcgcattcatgagtagattaaaatttgataaggacaatagaaattatgaataaagcattaaattatgatattgataatgaatttatttatcaatttgttaaaaaatttacaaatcaatttaattattcaggtagagaattatttttattttatttagaaaaatatttgaaaggataataataatgatgagaataaggaaatttatcaatatttgtataatgaaattggattattacagaaaaatagatgttcatcaattgaggaggcacaattattagaagatagttaatatttatcttgaacgtgtatcaaatctgaaaaatattgatcccaaaaaaattttcaaagttaatgattttaaggaaattttacaaagtggtgaaaaattaacatcatttgatgttaaatcattaattaaaataattttagagaataaatcaaatacatcatttcaacttgcaagtaaaataatttatcaaatgaataataataaaattaataatattaatgatagtattttcccaattgcaaattcttatgtttatactgaattatgtaataaattattatcacaatcaaaaccaagggttaaagaaataaataattttttgaaattaatggaacaatatgatattaaattagatccaaatttagttagcaaaattattaaatcatatgtttctaaaaaactttattctgaatcaataaagtttattaatgattatgttttctcaaataaccgtattgcaattcaaataaatgataatagtaatcaaggaggagagtatcaaggaggataagaaattatatactgatgttttcactgctttctacaaatcagttaaagcaggttcattaacaaaggaaatttatcatgaaagactcaaatcattacaatttttcactgaaaaattattgaaaaatgatttatatattgatgaaaatacattacaagaggcgaatgacaacatttttagcatatggagattatcaatcagttatttgccttatacaattttatggtaataaattaggaaatgaaggtaaattaaaatttaagttagttttagcattaaagacaaaattagagataacagttgctaaaactgctaaatatattactaaaaatgatgatacaaatattaataatgaaatttcattaaatagaattgcacaatatcgtcgtaaatttggtacattatcattaagtgaagatatcaaaactcaaagagattacccatggcaagaggttgctactgtggtttatcgatttgctgaattatttggatacaaggctacatacaccaaagaggatccattctcattgaatctatctgactatgaacgtcaagagaagcagaagatgtttgatactaagctgttggaactgcaacacttgtacggactggatcaatggcatccatagggagaaatttccgaaatttccgaaatttccgaaattttttttttgctgcatgaaaaatttttcatttgaaatttattattctattgtattgtattaactatcttgggttttatcggtttgatctttgtattgtataaatacttatcttctttcgtttatatatctcccccttatatcttcctttgtagagtgataaaaacttaatagagtcacatttcacacacacaatgcctcctaagtttgacccaaatgcatccaatttccaatccttccgataattggactgatcaaccaactggttatcaaggttatcaaggtgcaggaagttttggttataataccaatggttccaagtaacaaatataattcttaatcaacaaaagagacaacctcaacaaatgtcatttgaagattttatggcaaatcaacaaggtaaattaaataatagacaacaaactcaaagtccaattaattctcaaaataattcacgtgcaaattctaataataaaattccttcatcaacttcaattccatcaatttcttcaaatacttcaatttcttcaatgacttcagcattagaaaaattagatattactcccttatcagatattttatcaaatttaaataaatcaactaaaatttcagaagttcgtgaacattgtaatgaaataactgataaaattttcaatcaaggtgcaaaatcaattattgattggaaccttattgatattattaaaactttaagtagaccaaagaattctccattattaagagaaggtgcaacaattttaattcaaactttaagtagaaaatttgctggtgttaccccatttgaagcttatttcgttgatttctttaatttagcatttgaattatttactgataaagaaaatactgttaaaagatctgctcaaacttctgttgattcattatatggtatgttcccaactgaggcaaaggcatcaactttagtaagtcatttcttaacttatttaaaatcaagtgcaaaatggcaatctaaaattgcatgtttaaaattagttgaaaaattaattgaagaatgtccagctgatttattagaattagaattttatgatgcaattccaattttaactgatatggcaactgattttaaacctgaattagcaaaggaaggtatgaaaattttaaaacaatttgttaaagttctcgataatttagatttatcaccaagatatgatttaattgttgaaactttagctaatcctcaaaaagttccaaattgtattaaaactttagcctctgttactttcgttgcagaagttactgaacctgcactttcattagttgttccaattattgataaatctttgaaaatgtcatcatcatctcaagaacaattaagacaaactgttaaaattactgaaaatttaactagattagttaataataaacgtgaaattgaaaaatatattcctgttttattaccaagtcttaaacaagttattaataccgcttcattaccagaagttagagatatggcaaatgatgcattatcagttattgttgaagctgaaaaggaacaaagtgatggtaaattccatggtagattaaataaaactacatctgttaaatatattgaacaatttaaatcaaagattaatgatgatacattatttaattatttaaatggtattgttgtctctgatgctaatgttaatgattggaatgcattaactgaatatttctcaatggcattatcatcattctatgataatcaagaacaaaaggaaaaagatgttgaagcatttgttttaactttgaaaactttatttactcctgatgctgttaatgatgatgattctgaaggtattgttattgttaatgcaccattttcacttgcttatggtgctagaatgttattaaataaaactaatttaagattagttaaaggtcatagatatggtctttgtggtagaaatggtgttggtaaatctactttaatgagagcgataaataatggtcaattagaaggtttcccagatcaatctgttttgaaaacttgttttgttgaacataaattacaaggtgaagaaggtgacttaaacttagttgattttattgcagctgatccagatttaagttcaacaactaaggatgaaatttctacagcattagaaaatgttggttttaatgaagaaagaagagcacaaaaagttggttctctttcaggtggttggaagatgaaattagaattagctcgtgcaatgttattaaaggctgatattttattattagatgaacctactaatcatttagatgtttcaaatgttaaatggttagaagattatttagttgaacatactgatattacttcattaattgtttcccatgattctggtttcttagatactgtctgtacagatattattcattatgaaaataagaaattagtttattataagggtaatttatcagattttgtttcaattaaaccagaagcgaaagcttattatactttaacagattctaatgttaagatgcatttcccaccaccaggtattttaactggtgttaaatctaatactagatctgttgctagaatgactaatgttacatttgcatatccaggttctgaaaaaccttcattaaagaatgtttcttgtaatatctcactttcttcaagagtagcagttttaggtccaaatggtgcaggtaaatcaactttaattaaattacttactgctgaattagttcctcaagaaggtaccgttgaaaaacatcctaatttacgtattggttatattgctcaacatgcattacaacatgttaatgaacataaggaaaaaactccaaatcaatatttacaatggagatatagattcggtgatgatagagaagttttattaaaggaatcacgtaaaattggttctgatgaagaaagaaaaatgatggaagttcaaattgatgttgatgatggacgtggaccaagatttattgaagcagttgttggtagacaaaagttaaagaaatctttccaatatgaaattaaatggaaaaattggttaccaaaatgtaattcttgggttccaaaggaagtccttattgaacatggttttggttcattagttcaaaaattcgatgatcatgaagcttcacgtgaaggtttaggttacagagaattaactccaaaagttatcagacaacattttgaagatattggtcttgatggtgaaattgctgatcatactgctttaggttccctttctggtggtcaattagttaaagttgttattgcaggtgctatgtggaataatcctcacgttttagtcttagatgaacctactaattatttagatagagattctttaggtgctttagcaatggctattagagaatggaagggtgcagttgttatgatttcccataataatgaattcgttggtgcattatgtccagaacaatggattgttgaaaatggtgaattagttaccaagggtgtcgctgaaattgatcaatcaagattcgaagatggtggtaatgaagaacaaactaaagttgcaactgaattagcaaagaaagcagctgcaaaagctgatgatgatgattcacctgctaatattaaggttaaaaagagaaagaagaagatgactagaaatgaaaagaaattacaagaagaaagaagaagacttagatatattgaatggttaaactctccaaagggtactccaaaaccagctaatactgatgatgaagaagaagattaattgtattaatttttccctcaaatcttagatatatccatttccactttattattattctgaacattctctttataaacttgattactttattccgcttgaatttttttttacaacttatatttttacttctgtgtttttctaataatctaatcataacttttattcaattctataaaaatattgtatagttatcaaattaattataaacttttagaaactctttaaacgtataatgcaacaataatataacttatgattgtatcgaaaactaagttacaaaccaaccaacttaaaaagtaaagtattttcggactgaaaacagtccatataaacaagtgaaatctaagatgataacaacatcctaataagagtaacccactagtacaatagaaaacaaaattgaaaagtaatttatcaaataagattttccatttcattgattgaattctatcttgaggaatcttactgaatgtaaggtataaatgtgcaattgaccaaaagattggaccggcccaattgcaagtgtaagttaaaagacctgataaaaatatattatagttagttaaaccattgaatgaatttgttagatcaacagatgataaagaattagttgaaccaaattgaaagaatgttaaattttgtaaaagtaaaatgaaaacattgaatatatttgaattagttgagtaatttggtgaggtatatgcaaatccaaataaaattaggtataatagtgggaaaatcgggacattcaagtagtttgtttgtgaaattaatacaaatgtgatgattcccaaaacgtttgagaaataatgagtgattgatgttttctttttaaatatgaattttgataccataggttcaaacaattgaataagaattgtgaagagccaaactctttgtaataatgaaaataaaacattatttattttattaaaatcttcaagttgtgtcgtttctttcaaaaaagagataaatttaagacaccatttaggaaatactaaggagacgtcattgatattataattttcagataaataagctaacatcttagaactaccaactaaacatgttaacattgcaataagaacttgataaatattcattgacaaccccgcttcagtttttacattgatatgaagtaccattggtaaaaatgataagactaataaacccgcataaacatttggaccaatatcggaaggtaattgacttaaatatgtagataatttcatattagcttttaaattgtgtttttgaccactattattccacgctttaagtaaacgtaaaccaatcatcattgaaaaaattgcaatccaactaattgatccaattctaaatcttttgaaaataatataagcaaaaaaaatagtagtaaaaaaccaccataaatgatgttcttcttcaaccatagatgatgcaataaaattgactgaatatacaacaaagaaaacaacatcaaagaatgcagtgaaaaattgacctttaaaataaagaccaaatgtaataaaagataagattgtcattaataaataaattgctaaagctaaatgaagatctgaataattgtaatcagaggatgaactcaataattcttcctttgctgagttaatatattcaataagctgatcaatttccatattctcaaaagttgaaattttaccatttgatttgtccaatagaaccttcaattgtaaagcatttttaatcaaaacatttttctgttcttcttcatcattgtaaagatttaagaattttggtacaaaggaacctaaattgttaatagggatatttaaaccaattaattcagttaaagttggaactaaatcaatttgatcaattttatcaaaataattataatcatgattccaagtaattggactttcaatgttattatttaaatttaagtttttaaatttttgagaaactaacattaaagcagctgaagtttcagcagttgatgaaccaccatgattacctacatcattcataccatgatcacctaatataataaataaagaatttggattttgtagaacaacttcattaaagattctttccataatttgatccatttccttttgctttaaaggcatatttggactatttggaccacctttatgaccaatatgatctaaacctaaataatgtaagatcaaacaatcccaatttgatttcccctcattacttaattcataatccaaatgtcttgtaacattattatcaacaattgtaaaatcactaacatagaaactagcagtaccttcagttttagtgaaataatcggggaaaagtttatgccaagtatcatcaccgaacatatttattttccaatcatttaagaacatttgctttaaccaagaatcttgatcacctaaaccacttgtattttcatcatcagcaatatttaaaactgcatcaataaaatttggcgttgaaccagttgttatacctttaagtcttggtaatgtaacagttggaggatttgagaaagctgtaaaacctacaccataaccatcatttaataatttatgagcaaagtccatataagagttatttgagaacagaaaatctgctctcattgcatcaaccaccataagaacaacttgatcgaattgaggtttaggtttaatataatcatctggaaatggtgtactatattgatataactcatctggtgttaaaagaacttttgtagggaagaaacctttacaaaaaagtaagaaggcagccagttgggctagaagactaaatatcagcaccaagtatctcattgagttcaataataagtcctgcagaaagtaaaatcaaacaccttttcactcaggtttgtgtcagctcatcaattcctttgttttgtttacatgtaattcactaaaatcatttaaattattacgtaatatgaaaaataaaaaaatcaaaaattaaacttttccagtcgcgactattggaggcttaacattttaaatgaaaaataacccggcgatttcggaattaaataaattttgaaattgccaatgatttctatacttaggaaaggatgttacatgattgcaatgatccttagtgatattaagttcatatctttagatataatatatcttatccatttctcctataaacaacataatgcaaagctataagagtattacaagattagtcattcaaaatactagggccaatatcagactttattccagtgggaatccattttcatccaaaggtccttcaccacctgaattagatccggaagaacaaaaagaatttgaaaaattgcaacaagctgcaaacactcaaattgcaattgaacaatataatgaagatcatggttttaaaactgaagctgctccacctaaagtttcaacttctgatgttggtagttttgttaaatcaatgcaaacaattcctgaatttgatggtaatgtcaatccaaaaactggtgaagttaatggtccaaagcaagacccagttagacatggtgactggagttttaatggacgagtaactgatttctaattcttagttatcaattttccgcataattctcttataatttgattattaaaaaaatttataaattcttctatatactactgttattataacaataaaataataaaatcattgctaataaattaaattaaacaaaaatgaatatatagagttgaaaaaattaatcagtattgagtgtacttaacttttctgttaaggtatcaacaaatgtagattgtgcttctaaatgtttcttaaataagtttaatgatcttacattatcatagttattcaaaatttcactcttattatcaattaaaagtccaatctcagcagctttaacatcatctaacatcttctttatactttctaactctgtctctttctttaaaacataatccttcatacgtgataattctttgaaatatgcgtgttcttgatatgaaatactaatacttttcatattattatgtgcttcaattgtttccatatctgacataagtttagccattttaccggtgagtttttcttgtctttttgatgcatcaataaatgctgcctttaatttgagaaaattgtttaataatgattcctttttaataataacggaattataaacagtaatttgatgtcgatattctaaaatcatcattgataatctctttgaaatttcagaaacaatcttaagtaacagtagttgtccagaacttacataatcagttaataaatgaacagattttaaatcttcagctgttgtataattctcatctaaaattctattaggatattcatttagttcagtaacaaattgggaaatttttgataaatataatttaatttgtggtgatgtttctttttgataactagttgtgagatgtgacttataagttgcaacttccttttcttcattactagtagaatctaattcagtcattggatcatcttcctcattggatgcacttattaaaaataatgacaaaatatcctcactttctgccttcttaaccattgcataaacttctcttgtattccatgctgtgtaaatacagttttcattatatcttaatgagtaaccattggaattttcattctcttgttttggtaaatcggttttacctaaaattataacttctgttggtaaatgttccgcttgacataaatcattgaattcacttaattcaccaatttctaaacctttggccagactatccatccattgtgagaaatcaacttgtaaaatagttccatttgataaggttaccaataatgaatcacttgtaacaggatgaaccattgcactgcagatacgacctttcttagtatcgaaaactatattatcaagtaataaaaatgtttcaccactttcaatattttgattttcaaaaaccatcttagaatttgttgatctactaaataccacaatcatattgttataaataactaataaaatatcattaggtagtgaaataagtttaatagcatcaaatgaatataaatcttcagggaatgattccattggtaatggccctgaaattttacctttccaatttgcttctggaagtgtcttttttatatcaattttgttaggagttgatgattttgccaataatgctgatactttaacggatggtataagctgtgcttgttccttttcatctttaattgatttaaaaattaatgatgttgaatcaaataaatcatttaaccataattgtgaaactgataatgtatttgggaaaaatggataaattttgtaaatagatgaatccgatgttaataaaaataaggtcaatgcattttgtggactattagacgtttcctcatatgattcgttagttatagatgatccaaaacatattgatacaggatcaatgactgaggaatcaatatcaaattttgcctgtgatagattattttcatattcttcattaaaattataacgttgaagaggaattttgtatgattgatatgtgtcataagttttaatttctttagtggttaagacgacaatttcagattgaaattcactgacattattaaaaataacttgtctaacttcttcatcctctgatagttgtagatcaatcttatatgtagttgtataattaattaatgaaccttctttatttaatgaaatcaaccaacaatttttatagtcatataaacataacaattgttcacattgattcattaaaatttctaaaggttcaaatgtgagtttaggagacagttcatttgatttatgggcagcgtgtggtgataatttagttaatttaatcttgccatcagaaactgtaatgatctctgaaccatttgctcttgtaattgtacggtacttactttttgttaaaaattgctttgatttttcaacaatacggtcttttaaagtattactcattgctgtttagagaagagaaacaagtcctttcttgttaatcgttattgtcaactataaaacaacataaattaaaagaccaaaaattggcaaatttcagaaatcaaaaaattagaaaattcaaatttaatgagggtctgtgagagacaagagatttcatgcatgttttataagttaacaacttctttctatacgatatattcatcaatattcataattattacatagtttctaaaatatatatcaatacaatgactttagttagttattttcatccttttatgtagcttttgttattaatatctaatactcttgaatggaaatcttctattaaaagcacaggtatattccaacgatttgccatatgttccttatgagcagaaccaactttccaaactgttggagtattattgacaccaataaccaacagttcacatttctgtgttaatgtttggttgaattcaacccatttagatagtttattttgtaaaattctctcgatttgtgatagatcagttccttggaaacctgtaatacaaacttgaagttttgtatctttcttgtcatttatttcttccttatcttcatccttcccaccatcataatcatttccctcatcttcaatttgcagaatattttgtttgaattgttcaatttccagactttcaggaattgtgaaatgtttacaccaaaaatagtcaccactatcaactttttcattgaagataaaacgttcaatagcaaactccgttattgggttgacaaaatcattgatctcaccattatatttgtagtttataaccgtaaaatttaccattactgatgattcaataggaaacatctctcctccaaattttttgattattttattcagtttcctatcttcatcacttgaaaagccaaatgttttaaacttcaatcctcccaatattggaccttttcttttctcttctttattttgaaacttattcaagattggtttactggcctcttgtttttccttgtgaataaatgaatcccataatccattacccaaattttttctttttactttgacaatcttgtcttctatatcttcagactcgtcatttttagaaagaagatcaatttttctttttaagttaatgtcgatttctgaggattcatttaaaacagtataactatcatcattagatgtaaatgaattattgcttttgctgttctctcttatctccctattagatttttctctatttgcttttacattcttatttctaatatattcttctagtttacggacatgttcaccagctttccattcgttcaacttatcccaatcacaagcacgatctcttttacctaaattataagttttaaccaatgattcactaccaactttatcattttcatccctaaaactatatttcttttcgagtccggtaacatttgttaacaatttataaaaagtgaaatttaatggtaaacctctctctattgaatcataacaccaatccggactaacaactggtataccccatttaatagcagcatcaaatcgttttccttcagccatcatactaatcatcaaatctgattcattcgttaaatgatcaacagctttaccaccatttgtttcaataactttcttaattttatccaacaaagaatcttcaattctactcaatgatatggataaacttgcaaatggtttaatttgatcgaacattgagaatgaaaactctatttggttattttcataaaatttaaacacttcattactatcaataaccttcacatcaggtcggaaagctacaacatacatgaactttttagatttcaaccaatgtttttgtggatcattttgatttattactagtactttaacatctgatgttaaatctgaacaatattttgtgttgggacagtttccatcaattataagttttagctgattgatatcattttcagttaaagcagttgaagtcactattaggtccatctatatttgtttctatacctttctcagataaaacagtaagtgattcatgggaatagaggaagcaagctgtaacatgaaactttcgatgctccgacgccaaaaaagactttcagtgggccctctattcacagcaaccgactaaaattaaatttttcatgggaaacgcgtaatgttgtacatcccatagagggtttcagtgaagatctctacacttcaaataataataatgatgatctataaatggtttacacaatatgcaacaactatatgtgctaaaaatactacttataaaatcttttacaatatttcagaactttctccttcatattgctgattgtatatccatcaactaattcaatacctctttgatcaacaattcctttataatgaatttcataaattttcttacaaataaaatagctgtacattttgatacctctatgatgttcttcatcgatgcaacgtttaatgatcctttcaatcataaagatatcttcaccgtcaatgttttctatttcatgttccattttttcataaatacatttaagtatgacttcctgtaagctataatttaattttttcattttatcaattgagataagtttcttcaattcagtcgttttgattatttcataaagagatgtgataatatcatgtttctctatttcctcagcacattctaaaatattgtgtgaaactgaaagaagattatttatgtccaaaactatgttaatgtatttgataattgctaaagactcaataataaaaatcttcttttcaagcaattccatcatcacgtcgtaaacatttctactttcatatctccataaattgtagagaagtacggaaaaatcgttagtgctatcaaacttaatatcattcaaatcaataacaacagattgtttaatttcctcatttctactttcaacatcaaataataaatcattaataataatacctaaaaatccatcgattgcagggtattcatgcactggcatattatttaagttttgagcatcctcttgttttacgtcttcaataattaagttttcagtattttcatcttttaaattttcagcactgacttcaggagtttcctcaactcttgattcctctacttttgattcatcattaattgaatcattaacttcttccactttagcttcctcaacaatcaaatcttctactttctcttgcttatgatcactaaattcgtgaatagacagagtatccatatccggagttgagtcactattaattttgagttgatcgttcctgtcttcaacaaaatcagttgctgcatcattcataattgcattgtttacttccatttcagagtctttagaactgtcattcaacattaaacttccattcaaactgacggattcattgtgcattaaaatatcagaaccttcttcaataatatcttcagtttctttgtcattttgcttgcttatatttataataggaggttcattttctttgttttcttcatgaataacaacttctccctcatctacatcttcctcaattccaatactcatctccccaaattgccttttatcttctaaattgttgaaatcaaacatgctatcgttttgctgtttttgttcaatttgttcaatttgttcattttccttattatcatcagttttatcaacaacagatctattagcaataattgaatcgttagtaccatccatgcctgtcataactgtatcttcttgttctctattttcaacaggtaaatcaatggagagtcccaatatttcagaaattcttctcttatttgaatcatcatttaattcaagtaatgaattcataaaagtatctttaaattcagtcaaacagaacttgaatatttcgatatattctttttttaactcatcgtcaatatcctccctgtttttgttattgttattatcaattatttggaaactggtaaataaggaatcaaaaatacttgtaagtaagtatgattttattaatcctcttttaataataattaaattcttaaaaattttcaaaatcgaatcaataattgagtttctatttcttttgaattgaattgatagtataacattattggtagttgttgaactaattgccaaacttattatattaaccagtgataaacataaatcttcgagtgataattcattgacaatgaattcaatcctttgataatccctacttgttgttaagtataagcaaaaaactctaacaatattttcagttgaaacgtaattagagacttttttaaagaagttttcgtttcctggtaaaaatataatgttgaaaacttctgagtttataatacttaactgattcaatgcactatgaaacttgacagcaattgtactttcattacttttcaatattttattaaatccatctctttgttgttcctttgaactagaagttatttcttcgtatattatattatctctcttcaaccttccggtaaaatcatcaaaatcatcttccttgttttcgttattcatattttcattctcgatttccggttcattgctattaatagataatgcagatgtttcttgtctagctgaattattgttgatattatcagcagtaaagcttcttaccgataatttcggttttttatctgtggttcttttaatttctaatgattcacttctagtatttttccttgatgattcatgaacatttttaaatgcaaggtcatgatcattctcattattttcgtatctatttgatattctattatttttaattactggattacttgaatcgctactcagtcttgctttaatcagttgcttaataggaatacgtgttgtgtttgtattatcaaaaatacctctggctttagataacccacgaatagttaagacatcaagtttccttgtaattttcaattgatatgatgaatcaagattgcatagagtccaaaatgtctttctcattacatctttaacttgtggaattggatctgataatcctctgacaattattccttcaacagattcaacaaaataatggaattgggtcatgtcattgggattataatattttagcaataataattggatccaattaccagtataaacacgaggttggatattcttatcatgtgaagttgaagttagtaatgggaagattttgttattaatatttgtgtatagcaaaagagagatgattccaacatttgaattttgatgttgaatgatttttctggaggatgttagttttaataaattgattaataagtattcaactaatgaactatcaagatatccaccgacataaattcccaattctttacatagttgacatgtgttgttacacaacgtagttcttaatgacatcatacccttgactatgcattctttgacatttttgagtaatataacaaagttatcaatatcaattaataaatcctccccacgaaggatttgtcttaactttattatcaatgattgtctatatttccagttcttctctgtctctttatcattaaaatgtaattcaaattcagaatataaagtttcatatcttaatgcagtatcatccgaaggtgaaatttcctcaatatcccaattgggtatcttagttagtatatcattaagttgttcattatgatttttctcggaggtttcagtttgtattatttgacttgaagggttaaccatttcaaggtatctattatataagttttggtcaatatcttgtaatattgtagcagctgtatttgaagaaattttataattcattaaagcatttaataaatcagttttagcggaattatttgtagggttgataactttaaaatagagggataagatttcattacatttagataatatttcattgttatcagtattcagtaatttaacaatactctctaaaattaacttaaatgaaaatgtaaaactgtttgatgattcaattatttgataaaaaatatttagcacagaaatttgcattaattgatgatcataaaaatcaacatttatcccatatttcaataaatattcaataattaaatcaatttcaccatttggtgcacattcaataaagattttcagtgatttaatagctgttaaacgtattgaatcttttgtttcgtttaatgtttgaatcaaaaagggtaacaccggatcatatactgatacaagaatggatggttcttgaatactgacacgtttaattaaatggcacagtgtactaaaagacagaattgatagtgatcttacactataagcactaattaatgaagtcacataggctggaacgtatgacaaatcaactaaatttctcttaataaattgtttgaaatcagttattgcttcttgacaccaatctacatctccggaacgtattgcctgcagcattttattcccataattctggttctccatttgcaatataagattattagtctagtggttatctatatgtaaatatcagttgcagttgaagaaagaaaatgatgtttacattaattatccaagtttttccatgaaacacgaaaaatcttgaaattttaaagatcaccatttttccataaagggaaataaaactgattaatactctattatgttacttctttattatataaataactatctaaacttcatcgtatacaggtatacaggttgcaggtgacatccattgggaaattagaagtgttcctgctccacttggttgagaaaacccaatctcttcctttttcaaagcaaccccgtatattgcatgacaacgtaaactttctaacatttccaatgctagacctttccttcgatactcttgactaacaaatatcctagatacacctaaattcagttgcattactttcaatctatccacatttgatgttttgatatccataaaaaatccatctaatggtcccggtattgtggtggttattccaacaatatacgatttatttatagtggatttggatgtatttggttgagaaatcacaagcaccactttatctaagattttattctcttctgatggtgtattaagccatcgattattaatcattttgagcattgtacctattatctttcgtgtcgttgtatcacgataagaaaccaataaaatagaaagtttccgttcttcttgattaatggtaacactatgtgaattaatcactttacctatttcctttagcttagatatcttcaatgtacttatttcatatccatttaagtattcattatgatatcttttgtgttttgaaattttatcattactgttacaagtgatgaaattaaatccacattgtgaacatgttttcggtcctttttgctttactgcaaatgtcatttgcactagttttggtcgtttagcatttttaccaccatatttggctttcttatccatatcttatataagatcaataagaaaagagatgaatgaatattataaaaatttaataaggtgaagttgttaatttttcaccgagctctctggttagcatatcaacgttcaaaactataaatttattactaactcctatatacttttataaaatacaaaatgaatggaactgatatatatatgacattagactatatttcaattctgtataacctattaaaatcaaagtcttcattaacatgtccaacaaatgtattccaatagtaaactattctaatcaaacaccaattatatacaatttttggaaaaatataataagatcttgcaacccataatactgttctaaatacatgtcgaagttcaatcatgaaaatctctccaagtgtttcaggttctgaatcatcagtttcagtattagggtatatcacatcttcatacatttccttttcaactttaaataaatcaggagttttaatcttttcattgtccttctttggttttaaagcttcctttttattcgagttttgtgatccaaaaccagtattaaaatttttattattattattactaccaaattcttctgaaaagtcttcaacatcttcacctctttcttctcttctaattgcttcgtcatacatgtttttaaacatcataacactttcaacactctttgatagtctatcaaatgtattaactaatgcaattatttccattttagataaattaatttggaaatgttctttatcttttaattcgaaaagaacctttaaagcagttccataacctgttgtttgaagttttccccataatctacatctatcacaatgaacacaatccataattctagttatattataaaaattttctctaatttcttccttaacaataagagaatcatcttccttaaataaaacatcttcttcaaacatacattgatttttactatttgtaaattcaacagctggatttaataatgttctaaaacttgatttaaattcacattctttttcaacaaaattggaatcatcagtaaaatttaaatgatcaaaaactccataagtttcaagtttaattaatgatttcagaacaacaatataattcaggtataaattagcaattctatcaggatgattaccaactctaatcataaattgttctaaacttggtttgtaatccattaattgtttattcaaatattcatttgataaatgagttgaaattgatgcatgcataccactaataattttataaaagaaatttttttcaagacattgatcatgaccaagattaaaacaattttcattataaatacttttccaaatttgccaactttgatcaccaccataacctgtaaatctttccggattagcaactaaatcaacataaactgtatcatataggaatccatctaaatcacaataatctttatcataatttgttgaattatcatcatttaaattattaactaatgttgaaccttctaatttacccaaagcttcaggttgccaaatttcaggtaaatcattccaatcatcaattgtatcaactgcacatgatctatgcatacaaaatcctccatcattccaaaatggacattctttaaataaatttaatctaaaaattctgaaaaaattctcttgtacaagatttttaataattggtctaatttcattatttaattgattaatttcattaaaagtaacaccagttgattcatcaactgtatgatttaaaaatgtttcataattatcatttaagaatggagttttagtgaattgatggaaattattaaactgaacaggtgcaggtggttttttctcatatttaacaataatatcatcttctagaacgttaaaagttgcagaacaagcaaccataaacgtgatcagtaccagtaaccaacttttcatccttatcgatatcataattggggtgtatatggtataaatctacaaagaaccatcgattacaaatacataggaaaccttataaaagaaaacacgtattgcgccactggaaaaaaaataattttgtgggagggcggcccatcgatttttcatgacgtgtcgatatcacattgacccgagataagcattgattaatggtatgtttattatacaagtttaagaatatgtagatagatattaactcaggttaacataacattggtcttccaatcacgtaaaacatcaacccagctgttgtttttaacattatgatttttcctacgccaaatttcaagcattatttgtcttgcattccaatatgtaccaatacctgtttgagcaatattttgaccccatttattaaatccattctgtaaatataaggtcattgcttcactacctgcaataaatccttgccaaaataatggaataatatatgaagtttccttgttattttctaaaatttcttgaattttatttaaatgaaataaaactttttcaattctctctaaaaggtacattggattaacatcttcaataaatctgtaaaaataaataattaatgcatgataaaatgacataacatgatgataaataccttcatgtcttggtgaaataaagttttgactactattatcattaattgaatcattaattgatgatgcattatcttcatcatgaattaatgtccattctaatttccatgttaataatttaaattctaattgttcagctaattcatcgaaaaataatggtaattcaatattatgatcttcatgatattttttaaatcttgttaatggtacaatttctccaaacattaaaattaatgaatttggtaatccataaattgcatccgatgaaacaactttatcatctaatttattctttgatggttggaaacttgttcttgttatatcaacaaatgcaggaatttcagcatctgcattaactatattttcctttcttgaatctccattagttaaattttaatccattgaatatcttcatcatcattattaacaataaattcaatacgaactttaccattatcatgtaattttttcattatatttaccacgtttactattatttgtaccacttcttgaattataaaattgtgaacttggtgataatgaattggtattttcatattcatttatattagaatttgctcttagaattaggaattatcatcgttattattattattattcactatattactagactattttgtagataattattagaaattggtggtacacttgcacttttagaattttttgaaatatttttatttctattatttttattcctattagatcttgaaccacctctgaaaaattcctttaaaattatcattatttaaaacttcaagttgatcaaatgttggctttgaacctgttaaaaaatttttataatttttttcattaaggaaaatttcagatttttgaatattttctaaacttgttgaatcttgaattaattttaatgaactgaaaattctatgtaaaataattgcctttgaagataatttctttttatgtaacattttcttttcaataattttttcacaatgatctaaatgaattttacatgatgacattgtaccccaaacaacatcaattgtaaccattgataaaactgctgttaaaacatctttatatttttgttttaaaatatcttcttccatacatctttcaacaaattcatttgcttgtctacgtaattgaatacctaaatcaacataatatttcatttcatcactacctctaacaaatttactttgtaaattaaatgcactaactgctaataaagcatttaataaaccatttctagcatttgaagttttaccaattgaagctaattcaccaactgccataacagctcttgggaaataaatgaatttccaaggatttttagctaatggtataactgtcatcatatctgcaacatcttcaatataataattaagtaaatatctagccattggatgaacattaagtgaagttgttggtataccaaatttatcaattgctaaagattttggtagtggtaaatttgttaaaatttccattatattttttggcattttaatactatttgatgcatgaatattaattttacttacagttattggtttatcagtttttttgaatttattattttgattagttgtagaaattatattattttgtctatcatcatctgctgatggttcaattgttgatggtgttaaacttgaatcttcaactggtgcaatttcatcaggtgaaatatgtgatggattatatgctggtcttgttgttaatgacatacttgaaattgatgtattaaaagattctgaatgtgaatgtgaatgtaaatgttgctgtgtttgtgtgttggtaatagtagttatcattttgaataatttgagtctttgaatgatcgatttctgtgtttgaattattattattattattattattattattattttgtacaatattttgaccttcattatccattgaatttctaccttggaaaagtaaatgtaacatttgatcaggtactgaatcaggtacaatttccaatttttccgattcattattagtattaataggagtatttgttttcaaaactgtattaaagtttgaatttggtttaacattattattgatttctgattcagatgaatgatattttcatattttgattattttgattattattattattattattattcaaatatccaagattttgttgttgattatttattattggtggtatattattattattattattattagtttatattagaatttgtattaatattattatcttgattatttgaattatctaaatcaaacatatcaaagaaatgagtatcaccattaagtgcagaagctgtaagtaaaggcagcatctaataattcagtacttaaccattcattacctactaaagcagattttgaattaatatcagaatttgaaattgggtataatggatgtgtattgttattgtttgttgtaatattattgatattagtataatgaatttaagtttgagtttatatttgattgagggaaagggtttgaatttgaatttgaatttggtatgttttgaggataagcaaagttttgatttttcgatattgatttaaacatagtttgaaactgatttactctgtgttgaaagtgatgttgaagatgaagataatttcctttcttttattattattattattattattattattattattattattatcatttattatatcatttgataatttcgatttaagatttttattattatctctctttaatttctttgtattattctttttattaccctttttaattgattttttaattttcaattttgaacctcttaaaacaccgaaatgaccatttataacagttggttcattaattgattctaaatacatattatgtaatttagctaaatctgaatccatttcatcataataatgataagcatttttatcaggataaataacataatcaattgctcttctttgacaatattcagtttcttgatttggttttgaaggtaattgataaccataaatatcgaattcaattggttgtgaccaacgtaatttaacatcataaccttcacaaacaaaacctgattttttacatttttgacaacctggtctacctaaatcacaggcaattttccttcttctacaagtataacaacctgaaaatgattttgatctctttaatttaatacttttaatatcttctttgtctttatcattatcattcttatcatttgacattattgatatatgaaaaatgtgtcaagataagagataatatacccttaaaagacaaaatactattaaaatcgccacaagttgcctcttgtgaatgaaaaattttaaaattttcatttactgggaattcgctgcaatatgccattttcggatatctaattatctaattatctataaaagctattaaatctttatctacaccttctctgcttcatctgcttcatctgcttcatctgcttcaccatttctttgaccatttctccacgtaatataaacataaatattaaatattaacccaattataactcctaatccactaaatccaatacctgtatataatgcatttctaatcccttgtaattgatttgctccatgtttaactgtataatattcaactgtacctgcaacacctaaaccaattgcaattgaataattaacaactgttgcaattaatgaacctgcaactccttgatgttctcttggtaatgattgtgataataatattgtaccagctgggaaacttgtatccattgcaaatggtgtaattattaaacttaaaaatctttgaatccaataaatttgtgtaacaggtttaagagcatttaaaattaatccaattaaaaagcaaatcattgaaaataatataattaatgatgttggaattttatgaattaataaaccaacagatattgaagctaataatcctgcaatcattgcaggtgcaaattgaactgcaattataatacatgattgatttaatatatctaatgaaaatctaatcatataaaataaccaaataccaaaacttgcccaacctgctgaaattgtaattaatgtcattataatttttaaatttaatcttggaattaaaggatattgaacataattttgtgaaataataaatgaaatcaataataaaacactaattattaataaaacataaacataaggtttatcccaaccaacagttggaccttgattaaatgcaaaattaaataaaattaatcctccaacacctaaaattgaaccaattggatcaaacattgaaattgttaattttggataaattgttctaatatttttaggtataataaaataagctaaaattaaaatacatagtgaaacaataccttgaatataaaacatccaattccaagttgattttaatgcaaatattgaatcccataatgcaccaatgaaaaaccccccaggagcaacagcaccaaacattgcaaatgaaaatattttttccttaccatcagggaaataatgaccaattaatgctaaagaatttggagttgctaatgcaaatgataaaccttgcatacctctacaaatatcgaaaaattcaattgaatttgaatatttagaaatacctgctaaaattgaccaaattgataaatttaaataagcaatcatataaatatttttataacctaataaatcaccaattctaccagaaattaaaataaatgtaccaacagttaaagaaaatgaagctgacatccaagaaacttcacccatatcatttaaaatattaaaagattttgcaatataatgataaggtataatagtttgacttaatgaagcttgtgtaagtaattgagttaaaataattaaaaaaatgaataaaagtttatgtaaagttgaaatttcatcaaatgttggaatcggagttaaaaatgcttcatcatttgaagtttttgatattaaatcatcattattattatcaatactattatcatcattaatactatcatcaatgacacgcattagaaactgaattgtggaaagaagtaagtatatactataagatatcaaattataatattccacatcccatccttgatatactattattataatgtgtcaaaaattttcagggcatttaactctattagtaaaacttatgtaatcttttataatcttattaataagattactaaggttttattatattctaatactgctatcatgatataattgaataataaactactttcacagtattacattccaacgtctgttttctgttggatcagtatggaatatattgatagttttcaatatcaatctcctataactttccaaataagtatttcctatttcctaattgggtaattttactccggcgtttagtgaaattatttctatttttcatttatagggtcccaggtattcctaaaatccacagtattaatatttcgtcaatgatatcaacggttattttatattattatcctatattattctattctatttcctttttagaggttgaatattcacttactaacactgctctaaagacttaacctcatggcttctattacaaagtctattcgttcaatcgccgttataggagctggtcccgccggtatcgcttgtgttaatgaattggttcatgttgctaaaaatggtttgtcaactcttgaattaaatgaaaaaccattttaggaaactctgcttttgataaaattgtatgttttgaacaaaatgataatattggtggtgtttggaatttctttgaaaaacctgatccaaatttaccacctttaaattttttacaaaataatcaatttaataatcctgataaaatttatgaattcccaaaattacctaaaaattcaatactctcaaattcaacttataattccccctatatatcatattctaataaaacttttgaagatgaaattcgttggaataaaaatgctgcttataaagatttatttactaatatacctgaaaaatttatgaaattttcttatacaccttatgaaaatattagtaaaggtagattccttgaaccattaatatcttcaaatgatgttaaaaattatttagataaaattattaataattataatttatttaaatatttccgtacaagttcaagtgttgaatttattgaaaaggatgaaattaataatatttggaaattaactatacgtcaaaaatcaagattttctaaaattgaacaatggtatactgaaaattttgatgcaattattttagcaaatggtcattgtaatgttccatttataccgaaaattgataatttattagaatttgttaaaaaattcccaaatgttttaagacatagtaaatcttttagaaatgttaatgattttaaaaatggtaatattttattatgtggttcaggtacaagttcagcagatttaactcaatatttatcaccaatttctaaaagtattacaatatctcaacgttcagaaactgtttatccatggattaaagaatgttttaccaaaagtaaaaatttaacatttaaaccaagaattaaaaaatttttaattgatgaaaaatatattaaaccaacagttgaatttgatgatggttcaattaaatcatttgatcatattattttatcaactggttatcattatcatttcccatttttaccaaaatctaaaaattatattaaaatttataatgaaaattataattcttcaagtccaattaataaaattggtaatttatacctttatacattttcaacaattgataattcattagcaactgttggtataccaacaattggtttaatgtttcatgcaatggaatatagtgcagctgcaattgcaggtgttttctcaggtattaaaaaattaccttcaattaatgaacaaattaaatgggataataaacgtactaaaattgataaacctgaagtacctcatagatttcaaggtttctttactgataaattagaggaacaattattaaatccattatttgaattagctccattaaatcgtaccgtaccattaattaaggataatattaaagcaactgatgttgatcaatcaaatcctgctctaattaaagcttatatggcattaatttcaggtaaagtaaattcaaaagatttaattagataatgtagataatttagatacacttatattcttctttatagaacttgttatatataacataaatagacaatatagaatatcctaaattatttacttattcgtcccttggatttctttttagtatttaatgtcttatttttagcattttgttgttgttgttgtacttgttgttgttgttgtttacctgtaagtgatttctctgtaacatcaaacattttattagctcttgaaatttcctttgccataactgataaatcatgtatacgtccaagtttaactggatcatcccttaatgcaaatcttaaatcttcttcaataaacttatttcttttctgtaacttacgtgcagtattagctcttaatataatatccgttagataatttgtaacaacatcttctaacatatgaattgtttcaatattaggggttgatgaatcaccaaatgcaaacaatagagattttaagtcattagtgaataatcgttgtttggttttgttatgtctcttaggtgctgccattgctgtagaaaagaagtatttgatataataaagaaaccagatcgtatatttaaaaatagcaaactgccgtgtatatgtcaaaattaaataatttttcaatttgaaatcatgttactttttatcactgtttctttttggtgttttcttactaacttcttgaatgatataataactaatgaaggtcataactgcaagagaggtagaggatagaattgctaaaggtcaagccattgttatttatgataatcatgttttaagattagataaatggattaaatatcatcctggtggtgataaagcaattcatcatttaattggtagagatgcaactgatgaaatgaattcttatcattgtgatgaaactcaggaaacttttaaaaaatactttattggtaaaattgatgaaccttggattaatatgttacctccaattcaaggtggtaaatatcgtttaattgatgataataatataagtagtacaaaacttgttggacaagttgatgcaaatattgtacctaaaataccacaagatgttgttttattggatggtatggaacaatattatcctataattgatgttaaggaaaatggaccaattagagatccaagattattaattgataattatgataatacattagttaaggaagatttaaaggatataccatcattagattatgaaactcaacgatggttatctatcaaatataatgaattacatactaaaattatagatgaaaaattatatgattgtccatatattgaatatttttatcaattttgtcttaatttaggattattattatattcacttgtattttataaaactaaacattatttcataagtgcaatatttcttggatttttttggcaacaattagttttcattgcacatgatgcaggtcatgtttcaattactcataattatcaaattgataatatacttggaattttaattgctgattggtttggtggattatcaattggttggtggaaaagaaatcataatgttcatcatttaattacaaatgatcctgttcatgatcctgatattcaacatttaccattcttttgtgttagttcaagattatttgataatatattttcaacttattatgaaagatatttatggtttgacaaatttgctaaaactttattaccgttacaacattatttatattatccaattttatgttttggtagatttaatttatatagattatcatgggaatatgttttaaagggacaaggtcctagacatggtaaagctgcatggtttagatattttgaattattaggactttcatttttcacatattggttcttttatttattaattggttcattaccaactaaatgggataaatttcaatatattatggtatcacatataactacaatgattgttcacgttcaaattactttaagtcattttgcaatgtcaacatcagatttaggtacaagtgaaagttttgtttcaagacaattaagaacaacaatggatgtttcatgtcctgaatggtttgatttctttcatggtggtttacaatatcaagcaattcatcatttattcccaagattaccaagacataatttccgtaaggcacaaagtcatataattgaattttgtaaagaaactggtttaaaatattcaatttatggatttgttacaggtaatggaattgttattgataaattacatgatatagctaatcaagttgtattattaaaggaatgtattgcagttgacagtggtatgattaaaactaaatctacatagtcgtatcttattattctttatttagattctatatagatcaaatggttatataatatacaatataattcaatataccagtagaaacaaaggttttaagaatatattaaagtgttgatctgtggaaatcatggactctcgctattattccatttaactacactgaatcttcttcttggttcttctgatttatacctgtgtataggctgtatattacaatagatatagatatagatacagaatagagacattattgaaaaatgtttaaagttttcaaaacttcaggtatagaaggtaattatagtgtatcctccaatgcattatttgtcaataatggttgttggtctgtctatccagcaaaacataaaactaccaaaaaggcttattcagtatggcaatttaataagaaagattgggaaactcaacttacaaatgcaggattgattaataaatcaaataaatcaatgattatgaatgatatattagaaaatattaaattatttataggtaatcaatcaaaatttaaacatccaaattttttaacaattattgaaccattagaggatcataagaatagagttttatttgtaactgaatatgttatgaatgatctttatagtattaataaaaaagatttagatgaaattatgataactaaaggtttattacaaatttgtaatggattaaaatttttacatgaaagtgttaatagtgttgatttaaatttaaatccatcatcaattttaattactgataattatgattggaaaattaataatttaacatttttagaaaatatttcaaatggtataataagtgataaaattattgatccattaaattcaagaatgccatcatttttatcaattgattttagatttacaagtccaaatttattattaaatcataaaattgattatattgatgatattttctcagtttgttgtttaatttattttttgtttaatgatggtaaaatattaattgattgtcctccatcatcaagtgtatctgaatatgagagacaagttaataaattaaatcaattattgaaaaatgctcaaaataatcaaaatataaaacataatacatttgaaaatatacctgataatttttataatacatttcttaattcattcattgaatcacaggagagtaatactgatgttattcaattgaagaaagttattacaattaatgatataattagttcaaaaattttcaataatgaattaattaaattgttgaattcacttgatgaatataacacattttcaaattatgaaaaaattaattttttaaaaaatcttaaaattgaaattttcaaatttccaaaacctttacttattaataaatttataccaatattaattaattcaattgatataagtcaatttaagaaaaataataaaccaacatctgatgatgaagaattaattgttgaaagttgtgaaaatttacttttattatctaaaaatttatcacaattaacatttactgataaagttttcccacttattttaacaattttaaagaaaattccatttgatagttttaaaattttattattgaaaaatattgaattaattaataaatgttcaaatacatcaaattctaattcaaataatgaaattttcactaaattttcacttgatttatttgaaaaatgtattaatgaaaaaaattcaatgattgtacaagaattaacattaactaatattaaaataattttacaatgtcaacaatataatacaattacaactaatatattaccaaaattatcaacattatattcaactactacatcattaaaaattaaaacattgacagttaatacatttattataatggtttctgaattagatacaaaaattttagatgatcattcaattgttgaaaatttattaccattaattaataatacatcatcaacagtttattctaatactaaatttacaaataatttagttaaactttacaattgtatatttgataaattatcaaaatcaacaaataaatcatttaatattaaaggtaatgaattaaatatttatgatattatattagaattaggatttacaatttggaaaattggtaaatttataacaaatcaacaagatttaaataatattttcaatacatggaatagaattgaaatttatttaaaagatacattaaattctcaagttaaaatggaaaattcagttgaatctatgaatagagatgaaagtagtactagtactaataatataccagttattaaatcagttcaaccaattagacctgaaagtcaacctattaaaacatataattctacatcaacaataatgcaaccaatgaaatcaattaatcaaactatttcaactccaacgtattctccaaatccaattcaagtaatgaaaccaatgaataaaccaataaaaacaacatcaacaataactcaatcatcattatcatttgggcaaatacaacctcaagttcaatcacaagtgaaaacaacttcaacacctgtatctaatacaattgattggtcacaagctgataaatttaaagtaatgcaacctgttaataaaactccaataaacaatttttcagtaatgcaaccaatgaaggcaacttcaaggactgttacaccatctaataataataatggtaatgatgatgatgatgatgaatggtcagattttgcagttggttcaacgactactaagaatgttgcaattaccaataacgatgtttggggtgatagtttgatttaaataatgtgatatatcaatcaaccatatcattcataatctctttttatagacttttatactaatatactattatacaattacacaattctttgaatcagattgatttcgtgatttattctttgattttgtcctaatattagattttgtaatctgtttaggttgattgagttgttttccttgtttaatttcctttgatataagatcaggttgtttcctatgattttgtttttgtaatgaacgatttaaatgatgttcttcttgtaattggatttgtttagctaataacatatcagaagtttcttgttgttcctttataggatctttaattttttccaatggtttaattattgattgtctaaatgaagaattataataatcaccatcatcaagtattgataattgtgtccaaactatatctgattgagatgcataaccaatatctgttacgagtagataaatttgatcatcatgtttaagacatgtattataatgatcatttctgaaaaataggaaaatagtttcatttggtaataattgattgttaattaatgattgataaccaatatctgtaagttctgttttattattgtttaaaaaaagattgatttcattagataatgtatcaacattattctcattatctatatgagatactagataatcttgacaatgatcgaatgttggattaatattattggttgataaattcgataatagataatcaggcattaaaaacccatgatatacatttaaattaaatattgataaaattgattttattgtatttgtataaatattaaaatcattaaccaatatattattaaaacttggattaatcaataatccatcattcaacaatggtaatgtttcaatgagggtatcataaggtaattccttatcatcaattgacattaaacattcaattaggaaagagtatatatgatccattgatactttaccgggtgggtttgccaatgatttattcaagatatcattatgaaataatttaattgttttattgatttcattatcatccaatgaagataaggtattactatccgatgattgtaaaagtacagcatttatcaatgcaatgacaaagcagggcccattttcattctgacgtagttgtggtgacttggatccattggggaataccaccgtgtccactacgaggttgttcatattaagtatagatgtagatgtagatgtagaccttaagaaagaagagagtctctgatatcggcattgatcggagttgcggggttttccgtgtatgccatctttcttttataaaaggacaggtgatgtctctttttatgaataaagaggtatagtatccatcacatagcaacaatatggcattgggagatagtagtaagaagattgagttatttacacctgagtattaccgtacctgtgcaattggtgggtttattgcatgtgctccaacccattcatcagttttaccattagatttagttaaatgtagattacaggttaatgataaattatattcaagtacttattcaggtattaaaacaattattaaaacagagggtttacataaaatatttacaggttttgcaccaacatttattggttatggattacaaggggcatttaaatatggtggttatgaattttttaagaaacaatattcagatttaattggtacatcaaatgtatttgtttatcttgcatcatctgcaagtgctgaatttattgcagatttatttttatgtccatttgaatcaatgaaagttaaatatcaaacaactttaccaccaaataatgtaattggtttaacgaaaaatttatattcaggtttaattcctttatggtttagacaaattccttatacaatggttaaatttacaacttatgaaaaaattgttgaaatgatttatagtaaattatccaaaccaaaggatgaatatagtaaaattcaacaaactggtatttcatttttaggtggttatattgcaggtattttctgtgcaactgcttcacatccagctgatgttttagtttctaaaattaataatgatactaaaattggtgaatcaacaatgcaagcagtttcaagaatttataatcaaattggttttaaaggtttatggaatggtttacctgttagaattttaatgattggtacattaactggttgtcaatggttattatatgattcatttaaagtttatgttggattaccaacatctggttagtaagttatattatatatagtttatactttatattattctgaccaatttccccattcatcccatttctttctttgtaaataaacaaagcaaattaatccaaatattgaagttgtaatgaaaaataaatattctaatccaatatcattccaaactaatttatatcgtatagtattgttgatattattaatttcagtttctgtaagtgtaagtaattcatcatcttcttcttcctcatcctcttcatcagttgaaatcatataatccattacaccaacaattgaattttccatcatttcccatgcaatatcagaatgtccaacatcatcgaaaactcttgttgcatcaactccaacacaatctaataaacattcaacaccacctggatgattatctaataattcagaaatatcgaaaactaatccatgaattaacatccataaaccatttttattctcttcaagactatattttttaatatgagttaatgaaggtataatatgttttgataattcaattttattaattcgtcgtaaatttgaataatccattgaaagtaatttaaattcaattgaatttttatttaattttttaatataattttgttcattaattctatttaattttcgtatattcgtagatgattttatctttgatttattatttttacgtttagttttagtaagtaggtctgtagttgaactgctattattattattattattattattattaattctcctttttatctttttcaatttaagtatttttaaaataagtaaaaatttagcaaaataagaatttttatttgtccaattataaattaaatcaggtttaaattcatcctttgaaattatccaatcacaaaaacttgataaatcttttggatattgagtaattaatttattcttaaaattgtttataccatgatgttttttactattgttatttttatcattctgattaattgcaaaatctgtatcataatcattaaattcataatctaatctaaaatcataccccaaggtatgtcttttattaatacctataggattcttaaaattattctgatcctctttggtatattgtttcattgtagaggtatcagaaggggtatcagataccaaattaaggaaattaatctctatcattgtcctgttgtgtgtatagaagaatttagtaatttaattaaagtgtgaaattttaattttcactcaattgagaagtgaaagtcagcaatttccaaacagtctggtgatttccacttttctttagaatattgttcttataggcatatacaagatgagaagatttggtattattaaaaatattagatttaattcaactattaatgttgataaatcaacaaagggtatttatgataatgtacttgaacaattacgtgaaggattgaaaatttcaattaaacaaaaattaacatttgagaaaactgcaattagaggtattatgagtgaaatgaagaatttacaaattgataatcatggaacaattattaataaatttcaaattgttgatcattttaataaattaattaaacaaagggaagaaactgcaaaggaatatttatcacctaatcaacctgaaagatttaaagaattagctgaaaatgaaatgagggaaattgaaattattaaaaaatatttagctctattaccagttgcaaatgatgaagatattaagagaaaattaaaggtaattattgaaaatgataaaattactgataaacgtaaattatttagtaaaattccatggaataaaattaatgaagaatggaatgcaagtagaagtacagttagtgaagttattaataaaatggatttataaaaaaaaagacatgtatatagaagacatttatttagcagaatttttaactaaagataagaaattttctttactaatttcatttaataattgttttttcttttgattaccaattaaaccattttcattattaatatcaaattgagtattagtttgagtcattaaaattgcattaaataatttaattacacctctttgagcagttttacgtaaatttttttcatgttgtaatacttgtcttgcagttgattcatttgttggtaataaatttttaattctatttgcagttaattttttcttcttttcattaagtaaaattcttttagccttttgttctaatttatcatcatcaaatttttttaaatctttctttgaacgaactaaaattggatctttacgatcataagcctttaaatgagtatcaagtaatgcattcattgcatttgagaaattttcagattcttttttaattgaaagtttaggttttttaagtggttgtgggatgtcatcattatctgaatcagaatctgaatctgattcgttagaatctgattctgatgaagatcctgagatagattctgaagactctgaagcagactctgaagcagactcgtttatttccttttctatactttcattctgacttttgtctatacttctacttctctttagagagattgatttcttaggtgatgtagtggacattgtgtacagtaataaatgataatttttcactctgtagatttaataaaatattttaaataaagattaaattttcatgttgtgataaaaaataaaatttggaaaaaagattacgtaatgcaataccctcggaaatttcaaaaaatgaaaatgaaaataaaatgaaaatcccgcgcaatattcaaccattacgtaatcaaagccaaaactaaatttccgaggataaaaataaaaacaaactcctaagaccactaataaaataaaataaaataaaataaataaagaaacccttataatataataataaatactcactctccgttaacggtgttaataatattattaatacgcgcttaaatagtaaattaccattttaagatatgactcattttttatctatcctgagtctataaatactacccgtattttccacttttccatttaatcttatattatctacgtttattctcttttttctttactttcctctatcttcttctctctttctcttatcaaagactttttaacaacaaacaaacaacttcaagctttaactctatctctacattttttacttatcttattactgtgtttattattatacttcaaataaagaattaaaaaaatgtctgcttaaagccccccttctacgtttaaattaaattaaattaaaaaaaaattaaaatatcctattatattatatctgtttgttaaatcccccttatattattattattaaaataatatcaaaagtcaattaaatatttcttacaaaaatgttgccgtgaaatctactactattaaataatctcaaaatgattacctactactatattactactattaaaaattaaaattaaaaattacatattaaaattacaattaaaattacaaaattaactattaatcctattaaaatgttgttcagtgaaaattcttataatacaattgcattaaatgcaaatgcaaatgcaaatgatcatcatgatttatatcatgatcatgatgatttatttaatgaaactcctaaagttttcaatgatgatttattaaatcaaattgatttaaattttatctctcctactacttctgattcagatcaatcaattaattctcctgattcaattttatcaagtgatgatttagaatttgatttacttaagccttttattgttgatgataataccattaatgatattaaaattaaaaaggaagaaattgatgaagatattttttcaaatgaaattaatgaaatcattcatgatgttttcaattctgttgaattagaggaaagatctgtttcaaatcctgttatttcctttaataatgaagatttagatactatttctaataataaaagatcattttcaacaactgatttatcatccaattctaaaaagaaaactaccaattcaaagaaacaaaagattgatgaattaggttgtactccatatacaagaaagcaaagatttaatccattaccaccaattataattaaaaatgatggtgatgcagcatcaattaaaagagctagaaatactgaagctgcaagaagatcaagagctagaaaaatggaaagaatgtcacaattagagaataaatgtgaagatttaattaatgaaaataatttacttaaattagaaattgaaaatttaaaaaatttattaaataaatagagtctataatttttttataatctataatcttttattacttcactatactatactatacgataatatcattgtgatactaataataaaaaaaagctactactagacattaaaaaaagtattttgaggatcttctgagagatacgggattcgaacccatgtcaccagcttggaaggctggtatgctaaccactacactaacctcccaaattacttatacgtctcaaataaagaatcgtccatatctttatatccttgattatgtaagcagagaatgatagggtaatatattctatgaaagacattaatatagatatcattattagatcttataatacattataatataatataatataataatataatacactatactattatctaattaaccaattaaccaataaataaacccatagtaaaaatttcaattttcaacttcgcgaatttaataataataataataatatttactatgtttaccttttactatttactatttactatgttcattaattgatctctattcctttggcaaatgctggaattgatatgggtaatactatctccattgagatatttatttaatattaataataataataataataagaagtcctcttctcctactactactatagtttataaaaatatcaataaaccaaattatattcaaggtgaaaatgaagattcaattcctttacaaattaaatcattaacttaccttttccatagatttaaattttataatttaaaacctttattaattaaaaaaatagtggaaaatgatgataatgatgaagagaatataatttatgattttgattattttaatattgatgatagtaataataataaagacccctcatataatatactaattaatgaaaaattagattcaatttataatattcattattttaaaaatcaattccttaatgatccttataaaattttagttgattataataaaaataaatttcgttctttattaattttatcaaatgaaccaactaataatataaataataataataatataaattatcaaaatcaaatacccattaattcaaattttaaatttttaattttaaatccaattaattcaattaataattatattgatataataataaataattcaaatatttatattgaacataaagttaataaaaaaattaaaattgaaatattgaaaaaaataattaaaaaacaattaaaaaagatcatggacaattatgattctattgatgattcaacaataattaatttttcaaaagatgatcgtgcaattataatttcaacttatgttcaaaaattagctttccatattcaagttcaaagattatataaggcaactttaaagaaaaaggctaaatcaaagacaaaatctttatcaaatcgatattcaactaataatcttaaaaattttgataatattaataattataggaaattaaagaataaaaaatcttccttaactttattacctgaaacttcattatcatcttcctcctcatctacaacaaaagatttatcaattttaaactctaatgatgataatgatgatgatataaattattattctgataatcaagatagtcaagcttcaagtagtactaatagttcaattaattatttaaaattatttactgatgatgaaaagcaagcttgctttaaagatattaaattaattgtaagaatttgtattgaaagacaaagaaataattatatataatataatatagaattttatatagaatttaatgcatcacaatattgttgacaaagatcagaataataatctaattttgaatcatttaaaacattaaaacataaattaccattggggaaattaaatttttcaattaataatttaattaattcaatacttttagtaaatcttaaaatcatttcatttttattaattgtttcattcattaattcatcaatatgttcaatttcaattaaaaatcctttaaaattaccatgtaaaagacaattattagtccttatcttaaatttttcacctttattatcactacctaattcaatattaattaaatatccaataccaccttcacctctaattgtttgctttaatgtccataaactttgtaatttattaactaataataattctaaattttcattacttttattattatttaaattattacaacatccatttaatatatgttcctttaattttaaatcattattattaattgaattatttatatttggtataattgttaaaatacttttattattatttataatactaatcattctattattattctcttcattgtttaaatatgacaattgtaatgtatataaatatctatttggtaaaatattatcaaattcattatgtccattttcattattattattaaatggtttactaaatttattattaaggaatatacttaattcaaattcccaatttggtaatgtttcaagtgttaaattcattaataaatcatggaatttggtaattgtagttggtgatgcatgattaacaaataaaattgctgtaaccattgtctttgttcaaagaaagaatatatcataactacacaacatgtaaatttgatatgtgtttttttcatcaacaaaaatttaaaatcttcttttgatactttctttttctttccctaaatacaatgtttacaacacttgaaaggaaacgtcaaatatctgaagatttagaactaatagaaaatgcaattgttaaaagattatgtattaatccaaatattttaaataatgatactaataataataccaattttgagaaaagtacaacaattatgatgaaacatgaaattaataaattaattaattgttatgaaattcaattgaatgaattgaaaaatgttatgaatgatgatgattcaatattacatgatttgaaaatacttacaagtgataatttaattaattataaaacctataataataatacaaatattgatcatcaaatttatgaaattttttcaagtgatgaaaatttcccaattattaagaaacaattagataataatgaatgtaaaaataatgaaaaatataattatttatgtaaatatgcaagtgatttaaataaattggaaatatttgataaatttgaacattttggtgatttccttaatttaagagaattttataatatttggaaatctttacataaagaacaaatagattataaacaatatgttaaagatataactaaaaggtcgaatattatacttacaataactaatcaacaacaatatgaagattatcttacacaattgttacactatttattaaacttctatgaaagattaaatccatttaatccaatacctatattggaagaaactaattcattcaaacatgacccttattattgtttatcttgttgtaaattattctcaaatgaatcatcatataattcacatttaaagggtaagaaacattcaaagaatcaattaaaattttctcaaattttgataactgagagtaaaatagtttccatgattgggaatttggaaaatatttggattaatacaataaatgaaattgaaagatttgaattattaacttatcgtgaacgtgaaatggaaaagaaaggaattggtaaaaaattaccaatatctacatatcataaagcaccaataaaattatttctttataataagaatgatgaaattaatgatttaaatattaaaaatgatgaaattgaagatgaagaaatgttaaataatccattaaatttaccaattggattagatggtaaaccaataccattttggttatggaaattaaaaggtttatcacatattttccaatgtgaaatttgtgataatgaaaaatttcaaggtagatcaaattttaataaacattttaataatgaaaaacatagagatggattgaaaaaaatgggtataaatgttaaagattttaaatattttaaagatattaataataagaaagaaattgaagaaattattaattatttaaataagaaaaatagggaagaaattcaatttaatgatgattctgaacaagttgaagatgaatttggtaatttaatgaataaaaaagtttatgaacaattaaagaaacaaggtttattataagagtaattgtatataagaacactatttagaatatttagaaagataattatcacattgatttgataaattttcatcattaacatttaatgcatcttgtttaactaatttaattaaatttaaacaagaatttaaaactggtggtttaaacattattaaataaagtataacttgaaaaatcattttattccttaaaggatccatacaaagagattttaattttaaaataatttcatcatttaaatatggtaattcacttaataatctaataattaaatttctatcattattttcaataaatggtaaaattgaatcaattattttatttgtataaattaaataattattaatatttgttttattaacaataaatgatgaataatattcttcattaagccaaataattatattatcaatattttgctttaaatcattttctttaaaataattaaataataattcacgtaatttatttgaataaattgtattaatatttatacctcttgtaattaatcttattatataattaattgaaatttcatttggtgatgataataaatgattaatttgtaattctttatcagaatcttttaatattgaaggatttggtaattcaaatgattgtggtggtggtgaaggtgaatgaattattactggtgaatgtgattcatgtattggtggtggtgataatgatgattttataatgttttgttgataatcagattcattctgtatttgtgattgttcttgtatttgttgttgttcctgtatattattattattattattattattcacttgattatcagtttctttattttcttcttgtaattgatttttataattaaaacatctattaattataatacttaaagcataatttaaatcatcatttgaaacatttttcaatgattcaataattaaattatttcttaaatttggatcaagtgatgaaacatttaatgaatttgtattattatctttaatatcataatttggatctattaatgaaaataatgatttataatttaaatttaatggtattgaagattcattgaaaaatattggatgatttggatcttcctttaaattatctttataatctaataaatttttcttatatttaattgattcatcaatcatataagataattttttagaaaatcttgattttaatggtaaatctttatcaataaaatcctctatttaataataatgataataaaattttatctaatctatcattaaattttgataataaaatattttttaaaagtttattaaaataatttgaaaatttaaattgtgattcatatgataaaataaaatttaataatttatttgaaattaattgagattttaatttaaataatgacattaaaattgataaaattgttgaaaatattaaagttgaatgaattattggattattaatataattaaataaaaaatcaattaatgaatgagcttgattattaattgatgaattatataaaaatggatgatttgatggtataattgaattattatttggtaattgagttaaaataattgaatgaattaattttaaaattgctaatttacaaccaattgaacgatttaaatcattatgtttatttaaaggatttaaaggatatgaagtatataatttatcaattaaataattatttaaatttgataatttattccaaatctcttttaaaggattattcaattaaataattgaaaataaaattataaattgaataataaatttctaatgatttttgaacaattaaagttgaaattgaaggtttatcattaattaaaagtttttctaataatggtaataataaatgtgaagttgattttcttaaattaatatcaaatttatttgtaacaaatgctgaatgtataaaggatacacaagctaataaaacttttgatgataattcattattattagctctaactaatgcaacatccaatactgatgaaagaatttgtgggaaatacgagggactctctctagccagaagtgctgcctgtacaatctgtgatggatcgtccatactgtttggttcaatgataaaagagaaagaaaagtgaaataaagttattgaaaagtttcaaaattcatgttaccagattcgaaattatttcattacatgagaaatcgtatttgaaggttttcaggacatgtctggttttttcgactatattctaaacgtatatgtatggtcatgacagacatgtagatagtgaactgtctaaataggacaactgtgtatttagcttttctaaaaagattaaaaaatgaaagaagatatacacagtaaacatacattatataaactaatctgatgattcatctactacatttccaagtacaattaatatcccatcttgaacctggagcatcaaaactaacatatttaacaaatttcataactgaaggatctctaaacattaatgaaaatttattccaacaagcttgaccttcataaacaacactatcttgatctgcctttctataaattgcagcttcatcctcattcagtaccttcattattattatctttcttttcactctcatcatcatcaattaaacataattcataaccaccccattcaccagtttcccaacctgaagctggagttaaatttaatgttgattctaataaaccatcaacataattattatcattatcattatcattcatcaatatcattagtatttttagttgcaagtataaaatcatgaccaggtctaaatcttctaattataatttgatctttcattaattttaattcagttattttagttaaccatttcctaaatgacatacttttaaacattttagctaaatcacataattttgaactaatttctaaattctttatagctttattattttcattttttttaaaattttcaaattctttatcattaatttgatcttttaatttaaatatttgactagttaaatcaaaattactattatttgagaaattttcacattgatttataattgaaattgattcagggtgaatttatatcttcaaaatttgtaccatcaatatacataaatctttgtttatgagaaggaattgctaatttccaaggaaattgattttcaatttgtttttgattaattggcattgaaggatattcattaatttctacatttttcattaaatttttcaataaattttcataatctttatttaagaaagaataaatatcaacaactgattcattattaaaatatttgataatttattaattgaatcattagttaataatgaaggatttaagaaattagataaataattaatatctaaattatttaattcacttattgaaattggatttaaaattttagataattttaattttgggaaatcataatcttttaattcctttgattctaattgttgtaaagttgatttattttcagtttcttcttgttcaccaggtatataaccatcttcacctaattgaggtatatgaaaccaaccttgtaatgataatctttgtttatcaactttaacttcttcaacggcatgaaatgataaacctggttgaacagtgaaaaaagcaatttgattaaattgaggaattaattttgaatgaatatctgattttggtacatttggaactaaagaatctaataattgtaaaccaccaccataatgatttttccaatttgaatccggatcaggcatataaagaataaaggaaactctacgagacccgataacatcatcatgagttaataaatgacaaccttttgtatataattgaattgataaatctgtctttaaaccacttaatttaccacaattagttatatttgaaataaatgaacggaaagttttagaataaattgcacttcttaatttatataaacttggtaaacgttttaataaatcatcaggcattgcagataaattagctaaatcaccagattggaaaactttataaatatcagtttcctttttagtaaattcaatttctgaaataatttctttcctaacatttcttaataaatcatcattaattaaatttttaattgtgccccatttaaaaggttttgaattttcaacagaatttttttaaatttaattcaaaatctttattgaaaacatgagattggaaataatttttagcttgagcttcttcttccggagtttgtttaattgaaattttctttttcggagtagttagagtttgattatgagattgattattaatatcaatatcgatatcagtatcatcaggtaaatttcttttctcaggcataatgtgtgatgagagatattatgtgatagtactaatagaaaagggaatcaaaagcagatacaaaaccttaataccattaaaatatcgtcagattcagtactataaccttatttataaaatattttcatgatctgattttgaaaaatttaaaatttgaataaaattataattattacgtaatacaaataagtcacgtgatattacctaaccagtcacgtgatcaatataaaaatataaatattaataaaggtgtacagaagtaggcaattaccaatttgagaatattgtttacataatactaagcgaataaattcaattttctgttagtacttaatattaatattaatattattacctacatgaaataagtgagtgtattatgataatattggaaaaattatcatcatatttataattagaaggtggctgttttatttattttatttcattttattttattctagttttgtttagtcttgtttatttgtatatatagcatatagtatatcatatagtatagtatataatgagttataatccttatgctgaagataatagcaatccatatgctgaagattcaaataatccttatcaaaatgattcttatgaattaaatgattataataataattataataataatactaataacaataacaataatgataccataccaacaaatgattattcaaatgaagattttttcactaaaattcaaaatttaaaagatgatcttaatgattataatggtttaattaatcaattagaaaatttacaaattagtgcattaaatgctgttagtgcagatgaattaaatgcaattaaatctcaaattgatttaacttcatcaaatttaaaatcaattcaaaatttagatattaaaccaagattagaaaatttatttaaatcttgtcaaggtgataaagataaagaacaacaaactgaaaatttacgtaatcaatttcgaatttcaattcaaaaatttgctaaagttgatgataattatcgtcaatcaaatttaaataaagcaattgaacaatatcaaattgttaatcctgatgcaacttataatcaagcttatcaatttgttgaacaaattggtaatgaacaagttttcgatgaagcaattcaattagctaatcgtaaaggtgaagcaattgcatgttttagatgaagttaaaacaagacatcaagaagttttacgtgctgttcaattaacttcagaattaaatcttttattaaatgatttacaagatttagtatttccaacaagaaactgttatagattctgctaataaaaatattgaaacctgctcaagatcaattagaacgtggtgatgctaatgttataaaagcaagagatcatgctaaaaagggtagaaaatggagatggattttattttgggttgtggttgttttaatttgtgcaattgttggtggtgtcgttggtggtgttgttggttcaagacattaataattaatattactattactactctcatttcaatcgtttttagtcttattactttcacttctactattctaatattaattaagttcatcttctttttattctaatttatatttatctattttgtaactaactatatttagtcgtttttttttgtaataattatcataaaagtaattatcttcgcttagatatgaaattactattactatacgagcacaacagtttttttgtcatgataagctattgaatttaattatatctctatattataccactataatgatagcaatagagctataattgtaagtatataatacttatagtagtaaggtatctatgtacagtaaaatattagcaaaaaaacgggttcaaactgcttattttaaaagaagtatatttttttaagggtcctaaaaagcaaaaatagctgtttttcagacatcaactaagttagattttatttaataaaaatatctacagtcttataaaatacaatacacatgtgtctggtatgactatatggaattaaatgtacttaaataatatctaaaaaaaaaattatacaataactaatacactaattatcatcaacttgaactgaaccaccagattgactaattgcactccaccaagtattaaaatcatcagctgaacttgccttaaaaatataagtatttttcttaattgttaaacttgataaatctttaccacgtaatgaaaatctaaatccatgttttgtatcattacccatattctttgtttcacaatcaggtatatataaaactaaaattggatgattattatcaaattctcttgatgggaattgataaaaaaatcctgcagttgttataacaaaataaaaatttttataacttttatttaaacctaattttgattcttgacgtgataatgtaccttctaattttggcattgtacttaaatgattatcattttgaaatgtaatattttcaattgatcttttataaggatttttagaaatacaatttaaatttttatttgaatcaattgataaattacttaaagttttagttaaattatcattatttaaattaccattattatcaattgatgaagtaattaaatattttgaatttttagtaataaaattattccattcagaattatcagttatattatttaaaacattatttaaattaataaaatcatttgaattaccactaaaatcttcctgaatataatttgttaaatttgagaaaattcttttcaattcagttaaaatttttgattcaaatgaatgtaatgaagtttcacttgttgcaataaattcaattgttgaattttcagctaaaatttgtaatgatgcatcatttgataatgatcttttaacaaaatatggatcttttttataatcaatatgattatttcttgaattattaaaatgtaccaatatcaaattcttgaactgaattatctaaattttttaaacttttaattgaattttcctttgctttatctaaatctttatgaattgaagttgttttattaataaaatctttttgattttttaaaacttcattaattaaattatttagatcaggtaaaatttgattttcaatatttgatttaaaattaattgattttgaatattgatttgataaattttgtcttaataatgataaaaacatattaaaatcagcattttcaattttaatattatttggatcaatatttgaatcaatatttgtatcaattgataaaatatcagaattatcattattatccatattgatattagttggtaaatttaaagtttttgaaccactaacagttgtattattattatttgattcaaaatcagggaatttagttgacattttattattcattaaatcatattgtttaattgaagcaattgccattgaattataaccatttgtaataccttgaattgttttaattaattttaaatattttttataacgttcaattaaaatattagttgaatcagggaatgaataattaattaaatcagttgaaggtttaccatttgttaaaggatcagcaggagaaatattaattgaaggagtatttggtttaccagttaaaacagatttaatttgattcatatttgtttattataagaagtaaaatgaatataatttactctaaagtatctaacaaaaacggttcaaacatgtaaacaattactgatcaccaggtggttacggagattatttattgatgttaattgggctgtgaagaataattcaaatttgacatgtctcacactagccacatttaataataatgaaattattcagtggcgcagcagtcacgtgataaacactcacgtgacaataatatttttttttccgcggatttatcgcgtaatataacttagtatttacattctattatgacaatttaacaagactttattggttctgttattagtaggtattttcaagggttctcttatttatacaagtataattataattctaattatagttaaatcattaagggtctattgcatcgattattgatgtattatatttatctttactgttattatatatatatatataacatttttgaggatatatcaatgtacatcttaattcattatattatactctataaattaaaataattttcattccggcctttgaattaattaatttgctctactccttatacctattatcatacttaatgccttaatgatagcaaaaccctctgaatccgtcttctgctttcactacctgttttatgctttttctttgtttatttcttttctactttccactgcctttttttctccactcttttatacaataatatattgttacattgtattttttatattattggaagaaaatgtttgcattcactactatacctggtataatctgttgaaaacttttttttttctgaaatgtattttcattattatcatcagatctaacacactttcttttaacaaaatcaaaaaaaatgaacgatatatttaacgttcaaattttctttgtggtctttagagaagctcttgaagctgttattgtcatttctgtccttttagcatttgttaaacaatcaattggtgaaaaaaatcctcaagttactaaaaaattagttaaacaaatttggtttggtgcaattacaggtataataatttgtattgcaattggttgtgcatttattggtgcatattattcattgaaaaaagatatttggactaaaactgaagatttatatgaaggtataatgtgtttaattgcaacaattttaattactgcaatgggtattgcaatgcttagagttaataaaatgcaagcaaaatggagaattaaaattgcaagagctatagttgaacctccaattaataaatctgatagattaaaatgtggttatatggttaaaagatattcaatgtttattttaccatttataacaactttaagagaaggtttagaagcagttgtctttgttggtggtgttggtattggatcacctgcaaaatctttcccattacctgttgtttgtggtttatttgcaggtgctttagttggtgggtttatgtattggggtggattcagcaatttcattacaaattttcctttgtatttcaactgctattctttatttaatttcagctggtttattctcaagaggtgtttggtttttcgaaaattatatgtttaataaaaaaactggtggtgatgcagcagaaaatggttcaggtcctggtacttataatattaaatcatcagtttggcatgttaattgttgtaatcctttaactgataatggttgggatgttttcaattctttattaggttggcaaaattctgcaacttatggttctgttttatcttataatctttattggcttgcattaataattactttaagtttaatgttatttgaagaaaagaaaggtcatttaccattttgtaaatcattacaattaagacaattaaatccaatgtattatattaaaggtaaaaagaaaaatgaattaacaaaggaagaagctgatttattatttcatcaagctcaaaaagatttaaataaaagagtttcaaatgaatcattagtaaatgatattgaacttgaaaatattataaattcaactactacaccttcaaatgaagaaattgtggttaataaataatttatttatttatttatatacatctctaatcctaatctattattctctaacaacttaaactggtagcaagacattgtatgtaataatcatacacaatattacgtaataataggcaaaagcccaacaattggaaaccaacaaaacgtgtaacatgaattttctctcgtttttccattttctcagcactgcaaataaatacccgctactcggctcagtttaatatacttgcttgcttgatatacctccttttgtttgcattttcattaaacaatcgtcacatttatccacaatgagacctgaagtacaacaagaactttcccatattcttttaactgagcttttagcatatcaatttgcttctccagttagatggtacgtatattatcttatatctttattattaacaatatactaactaaacatttaatataggattgaaactcaagatgttttcttaagagattacaagactgaaagagtcgttgaaattggtccttccccaactttagcaggtatggcaactagaactattaaggctaaatatgaaacttatgatgctgcattatcattacaaagacaagttttatgttattcaaaagatcaaaaggaaatttattatactccagatccagctgatttagcagaagcagaagaagaagctacaccagctcaagaagcaaccccagctgctgctgctgcatcctgttgctgctgccccagttgccgttgcagctccagtcgctgccgcacctgctgcagcatgctgcagatgttgcagatgaaccagttaaggcaagtttagttttacataccttagttgctcataaattaaagaaatcattagctgaagtttcaatgtcaaaggcaattaaagatttagttggtggtaaatcaactgttcaaaatgaaattttaggtgatttaggtaaagaatttggtagtactcctgaaaaaccagaagatactccattacaagaattagcagatcaatttcaagatactttcagtggtgcattaggtaaacaaacttcatcacttattgcaagactgatgtcatcaaaaatgcctggtggattctctgttggtgcagctagaaaatatttacaatcaagatggggtttacaatcaggtagacaagatgctgtcttattacatgctttaactaatgaaccagcttcaagattaggtggtgaagctgatgcaaaggctttctttgatacaattacacaaaaatatgcttcaattgaaggtttatcattatcatctgcaagtgctggtggtgctggcgcagcaggtggtgcaggtggtgcagttattgattcagctgcattagatgcaattactaaagaatctaaagatttagctcgtcaacaattagaaactttagctagatatttaaagattgatttaactaagggtgaaaaatcattaattaaagaaaaagatgcttcaaaggttttacaagctgaattagatttatggtctgaagaacatggtgaattttatgcttctggtattaaaccagttttctctccattaaaggcaagaacttatgattcttattggaattgggctagacaagatgctttatcaatgtattttgatattatctttggtaaattaacttcaattgatagagaaactgttactcaatgtattcaaattatgaatagaactaacccaactttaattaaattcatgcaatatcatattgatcatactccaactgaaaagggtgaaacttatgaattagctaaaaaattaggtcaacaattaattgataattgtattgaaatgttacaaaaagatcaaaaacctgcttataaagatgtttcttatccaactggtccaaaaactactgttgatgcaaagggtaatgttaattatgtagaaacaccaagagatgcatgtaaaaaatttgaagaatatgttcatgaaatggctcaaggttgtgatatgactaaagaagttaaaccaactattgaagaagatttagcaaatgtttataaagctttatctaaacaagcatcaagtgaaaatcaattaaagattgaaactttatacaaacaattaattgaatttgttgaaaagaatcctgaaattgaagttaaaaaatcaactaaaactgttttagattcttcatcatctgatgaaactagtgaaattgcttcattaaaggattataatgaaattaataaaccagtttcatctactattccaccagaaactattccattcttacatattaaatcaaaatctaagttaggttcatgggattatgataaggattaaatcatctgctttcttagatggtttagagaaaggtgctgttaatggtatgtcatacaagggtaaatatgctcttattacaggtgcaggtgctggttccattggtgctgaaattatgagaggtttattatctggtggtgctaaggttattgttactacttcaagattctctaaaaaagttactgaatattatcaatcattatactcaagatatggtgcatcaggttcaagtttagtcgttgttccattcaatcaaggttctaaacaagatgttgaagctttagttcgtttcattatgatgatgttaagaaaggtggtctcggttgggatttagactttcgttattccatttgctgcaattccagaaatgggtattgaagttgaaaatattggttctaaatctgaattagctcacagaattatgttaactaacttattaagattattaggtgaagttgcaactagtaagagaactagaaatattactactagaccagctgaagtcattcttccattatctccaaaccatggtactttcggttcagatggtttatactctgaatctaaacttgcattagaaactttattcaacagatggcattcagaatcctggtcttcatacttaactgtttgtggtgcagttattggttggactagaggtactggtttaatgtccggtaacaatatgattgcatgaaggtattgaaaaattaggtgttagaactttctctcaaaaggaaatggcattcaatattcttggtttaatgactccagaagttgttagaatgtgtgaagatggtccagttatggcagatttgaatggtggtttacaattcgttgaaaacttaagagaatttactaatgatttaagaactgatattaacaagtacttctgaagttagaagagcctgtttcaattgaaactgcaattgaacataaggttgttaatggtgaaaatgctgatgctccattcaacaaggcagaaattgttccaaaggcaaatttgacttttgatttcccagctttatctccatatgatcaaattaaagcaaaggctccagaattagaaggtttattagatttagacagagttattgttgttactggttttgctgaagttggtccatggggtaactcaagaactagatgggaaatggaatctaagggtgaattctcattagaaggttgtgttgaaatggcatggattatgggtttcattaaatatttcaatggtaacattaagggtaaacaatatagtggttgggttgatgcaaagactaatcaaccagttgctgatatggatgttaagaagaaatatgaagaagaaatcttaaatcatactggtattagattaattgaaccagaattattccatggttatgatccaaagaagaaagaattaattcaagaagttgttattcaacatgatttagaaccatttgttactgataagccaactgctttacaatatcaattacaacatggtgataaagttgaagttttcccagatgaatcaggtgaagaatataccgttaagatcttaaagggtgcatcattatttattcctaaggcattaagatttgatagaatggttgcaggtcaaattccaactggttggaatgcaaagaactatggtatctctgatgatattattagtcaagttgatccaattactttatacgttttagtctcctactgttgaagcattattaagttctggtgttaccgatccatatgaattctataaatatgttcatgtttctgaagttggtaactgttccggttcaggtatgggtggtgtctctgcattaaagggtatgttcaaggatagatacaaggatcaaccagttcaaaatgatatcttacaagaatctttcattaatactatgtcagcttgggttaatatgttattactgtcatcttctggtccaattaagacaccagttggtgcatgtgctactgcaattgaatctgttgatgttggtgttgaaactattttatcaggtaaggcaaagattgttttagttggtggttatgatgatttccaagaagaaggttcatatgaattcgcaaatatgaatgcaacttcaaatactattgatgaatttgctcatggtagaacaccatcagaaatgtcaagacctgcaactactagtagaaatggttttatggaagctcaaggttccggtattgaagttttaatgactgcatcattagcattaagaatgggtgttccaatttatgcaattcttgcaatgtcatcaactgcaactgataagattggtagatctgttccagcgccaggtaagggtattttaactactgcaaaggaatatcatggttcaatgaaatattcatcagcaaagatggatattaaatatagagcaagacaattcaagaatagagttaagcaagttaaacaatgggttgaaaatgaattagaagaagttcaagaagaagctgaattattagcaactgaagataaatcatttgataaatccgaattctttaaggaaagagcagaagaaatcgaaagagatgcatcaaaacaaattaaggatattcaaagacaattaggtaatgaattctggaagaatgatccaagaatttcaccaataagaggtgcattagcaacattcaatttaacaattgatgatttaggtgtttgttcattccatggtacttcaactaaggcaaatgataagaatgaatctgcaactattgataagatgatgcaacatttaggtagaactgaaggtaatccagtttttggtgttttccaaaaattcttaactggtcatccaaagggtgcagcaggtgcttggatgttgaatggtgcaattcaaattttaaattctggtactgttccaggtaatagaaatgctgataatattgataaaattttagaagatttcaaatatgttttattcccatcaagaactattcaaactgatggtattaaagcagtttctgttacatcatttggtttcggtcaaaagggtggtcaagcaattgttgttcatccagattacttatatgcagcattatcaagagatgaatttgaatcatattctaagaaggttgaatcaagacaaaagaaatcttatgcatacattcataatgcaatgattactaatactatgtttgttgcaaaggaacatgcaccatatactgatgatcaagaacaaagtgtttaccttgatccattagcaagagtttcattagataagactaatcaatatagttttactgataaagaattacaaagagaaggtaaatatgtttcaaatactgcaagtaaaactgcaaatgttttaagttcattaacaaaggaacaaattggttcaaagggtgttggtgttgatgttgaattaatttctgaaattaatattgaaaattctacatttattgaaagaaattttactgatgaagaaattaaatattgttcaaaatctgcaaatccaagatcatcatttgcaggttcatggtcagcaaaggaagcagttttcaaatctttagaagttgaatcaaagggtgcaggtgcttcattaaaggatattgaaattgttcataatgctaatggtgccccaactgttaaattaactggtgctgcattagaagctgcaaataagaatggtgttaagaatgttaaggtttcaatttcccatgatgatgttcaatcagttgctgttgcaatctctgaattttaattagatttagattatagtattcatttttagttttttatagttttaaatttaaacaatttttttgaatattaatagtaaaagctttatataaaatatgaaatgtaaagaacatgttaaataatgatattagtgtaaaaatcagtaataaaaaaagatgggtaattctatatgagagaaaagtaaaggaaaaaaaacacataatgtgtatttaaaaaataaaaacataatgtttaactgataaaagaacaaaagaataaataaggagaacaatgatgaaatataaatacaaagacaaggggaaacacaaaatgatagtatatatggtacatattttataattaatattgaaataatcaggaaaaccagtttcagagtccaataaagaatgaggaaggtcatacagttttcaaatccatcaaggcaattgctgcaagttcttcaggagatttaccagaatccattggtgttggaggcgttactatacttgattgtctattattttttaaaaatgttgcaccaacagatttccaatcttcttcatcagtaaaatttgatccatcatcattattattaatataattgatatctgaattatttgtatttgaatatttataattttttaatgaagttaaagtatcattatcatgaatattatgttggtcattactactatcgtgatttccattttcatcaatttcatcatcatcatcatcatctataataacattttcattatctttatcatggaaagatattgaactattattatttgaaaaatgtggggaaatattagttcgtaagaatgattgtcttgataaattagcagaatttgagaatgaaacacgagattctcttctttccaaaggtgcatcatccaattgaacttctaatgaatgttgagtaaatgaagatctcggtttacgaggtttaacaatacctgcaaatgaaggacgatgagatgaagaaacagatggtgaacgtatatttggcattttagttgtagaaaatgaacttgatctatttgtcattctattataaaattggatattattattattattattattgtgagaattgacgttattaatattatcatcatcaatatcatctaaatcatcgaaatcatcaccagaagttgaatgaatcaatagcttcattaacattaccataagttttcaaagaatttctgaaatcttgaattggagccagagttggagatattggcattttaatttgatgatctaaaattgcattactaatagattctcttctaagagatgaaggctgaaattttattatgatcatagtaagaagtttgtgaagaacttgagattggacgactaacattatcattaattgtatttgtatttgatgttgttatgttatcaacattatgttcgatattggagttattattagcattagtattactactagcattagcattagcattaagagcagcacttttaattttagcttcaacgatttccttatcaacaactttagcttcccattgaccccaaccaattttttcgaaaatacaattattttcaatatccccagattctaatgaggacattattaaacgtctttgttttgataatgataaattaccaaataatgggacttgtttaattaaatgaccagttaaatgacgaattggtaaaggaccttcatttaataaaatatttagcaattctatttggagtaatttcatttgcagttgcaataccttcaggtgaagaagttgataataagaatttttcttcatttgttgaagattttcttctttgttttttctttaaagttggaacaatggtagaagtattatttgttggagattgaattgaatttgaagttggaggtgggcttggacttgaagagaatgaaatatttgataaaggtaatgaagaggatgttgtattaattggattattcagtaaattattaatatttgggacaattggaaggatgaggagatgaaattttatcatctataaggttcccatcatctgaggacctatgaggcagcattttaatgattgataattgttattaaaagagatataaacagtcttgataaaaggcgatgagatgaattgattgaatagataataagatattgccacagtgaaatttcaaaattgataaaacaaaccgggtagtgagaatttattattattatgactgttataattactattattatcaattattactgtttttattgttatataattataattaatatagttattatttatatattaaattagtagtagggtaatgacatgtgtgtatttgattaaaataagtaagtaagtaaataaatagataaataaataaatatttatttgaattttttaattaattattttaaaaaaaatacaacaactgcaagataaggaaccaattgatttatttttaattaatcaaacttaaagagcagggaagttcttgtcatttaattgattaacgactggtttagaactttttggtttaccttggaattttttgttaccaccatttctaccatttttcttaaaatcagatctttcaggtctttctggtctttcaaaaccacttgacattgtaatattagctggaacaaattgtttttgttttaaagttttagatttaactttcttttcaacacttgctggaatgaaatcttcaacaactttaacaacaattgatgattcatcaatttcagatgctgaagatacagctttctttgatttattaaattcagaattttgtaattcactaaagaaatcagcagcagatcttaaaactggttttgattcttcttcttcatcttcattagcattttcagtaatttcaatttctgcatcttctgcaccttcaatttgagattcagcttcatcacctaatttatttttttgagatttagcagtttcattcttaccagttcttgaatgtctatcaaattttttatctttaccattctttcttgaagttgatgatggaccatttgaatctctatttttattagagaattttgcacctgcttcattacctgaagctcttggtttaccacctttagattttgatggatctgcctttggtgggacaccatccttcttagtagatttttgtggagcaacaatttcctttggtgcaatgaaatcatcttcatcaccggaaacatcgttacctaataacgcataaaggttctatattataacacaatgttagtaaaactcaattccttttaattcaatcatataatcataaacttatacataccttattttgcatagacatgtttggttactttaaagcaatgtaaattaaacacaacaatgtgagcaagtccaagcaaatagataaaattgacacactatttttcactcactggaaatcgacgctgtggggaatgttagacatttactatgttaaaattcttactatgcggtggcaggggggattctgggtttttattttagatttttttgctggtgcactgttacagtctcaccgacgcagaaagggggctcagtatctattttaggttttagttttatttactatacttttatttaaatctaatacaatataatctattccactcttgactgttcttgttggcaatacatacacctgttccaactctcgctaaaaatccacacagtacctgtcttaattcatctcctaccataccaataccaactccattaactaatttaattacatcttcataaacatttggacaaactttttggaaatcttcttcataaaattcagttatagcttcaagtatttcaacaattactggcatccatgattgtaaatttcttgtctcagatctctcctcaaattcaatccccctctctaataatgatttacttaatggtattaatttttcaacaattatttgtcgtccttcatcatcacatttatccttatcacaataaactcgaaatattatactaatataaactccaactgatgatgtttcctgttttaataaattaggtaatttatcaacaattcctccattccataatctaactcttaattcataatcttcattaaatttcttggcaaattcataactttcaaataataatttactaaattcaattaatgtatcatatgttatagtttcataaaattcattattatcaaataattcacttaataattgaatcatatgtaaatgtaaaacacatttaataacaatttcttgtgatgaaaattcttctttatcattatcattatcaatatcatcaacatcatcaacatcatcttcatcttccaattgctcttcctcaccatcttctacattagctttattttattattaatttgattattcattaatggatcaagttcaaataattcaactgctgatgttagtttgaataactctttaaatgttatattaatctttttccaatgttcattatcaaattttttcatatttgtaaaaattaaatcttgtaaacatgaaattccaattttagaaattgcatcattatcttgacaaatacatgatattaataaacttaaatatccatccatcattttacttaattcttcaaaaaatgtactaaataatataatcatctttcttaatgcttgaatcagtgtacttgataaccaaacccataatccttcattttgattaaaactaatatctccatgtctctttaatatatcaaatattgggaataataattcaaaacatattttcctccatgatttttcattaaatttcttaccatgatcaattaatgcttcaaacataaaatttaatgccttggatctaacttctaaatcattaccttccataattatattattaaaactgaaaattaatgtaaaccaatatttattaaaatattcttcatcatttgccttattctcaatttcaatttcattaccacatctttcaactaactcattaatcattgataatgattttaaactaattttttgaaatctctcatttttacaatattcacataaacaatcaactaattttttaaaactattttgctctttaatatcatttaaatgttcatcaattatttctttaacaattgttaaaccttttaatacaaatttctcattatcaacattaaatccaatatgttctaaaatttctaaaattgtactccaacctgatctaattaattcagattttttaataattaaatatttaatacaatctaaaaccatttccttaacttcaagattactattattaattataatataatcaaatggttttaaaaattctttttgaaatttaaaatgtgataattcttcaatattgaaaaatctttcagataattgtcttaatgaatcaattgcaaaaattgaaactttattatttgaattacatccaaattcattaaattcttgattcataactttccataattcagaccattgtaatctaattctactcatattataataacaaacatcaactaatttttgtaaacaaaacatccttggttcattactattttcactactttgaatttcttctcttgcaacttcaattaatccttcaacaaattggaaaattccatctccttcaatttcattacttttactgaatactttatcaattaaaacatctaattcagttgaatttattttattgatcatttcaattggtaatttttgattaaaatgatgtaataaaacttgttgtgacatactttgtcttttactattaccactaattgcagcaaaaaatccacttgatgcattattttcattttgaattctcttaatatcaatagattttttactaatcattgcattgattaaatcaggtacagaatcagaatttacaccctttgataataatcttaatctttcaacttgtgaaataacaataaatatatctttccatgaatcatttaaataagactttttcatcaattgcaatatctaataatgtataaattgctttaatatttttatctttcatatcttcaggattattaatattagtaaattgaactaaacctctcaaaaatgattttctagcatattcaatatcaaatatacatgataaatgaactgataatctaatacctaataataataaatctgcagtttcttcatcatcatattctttaaatggtggtgttaaacctgctaataatgacatccataaagtatcaaaaattgatctaacatgttctggattattgttaacattttgttcaaatgtataatattttaaatttttagttttattatttttacctaatgatatcactgtactttcagtttttttacttaatacttttgatgctttactataagcttcctttgcataatctctaccaaataaactaccacctaaaattagtgtttgttgattaacagttgaatcatttgaaattaaagcagcttgatgttcactatttaatataatttcgttattttgaatatctttgaaaacttccttctaaaaatttaatatctaaatctttaccatcatcaatacctctattattcttagcaaattcattcaaatgtcattctttttttaatttgtggtgaatgttgatctgtatttaacataattacagaatatgataaaacatatacagtatcagcatttgcaaatgtatttggattatcaacaacatatttttcagcaaattttaacataaatctatcaataacttgtgattcaccaggtaatctaaaatgttgtaaaaataatcttaaagaatcaagaaatcctaaatttttaaaatctaataaatcaacaaatgaatgcattacttgaatattctcttctttactaccacctaaatattcaccaatttgagatttatctaatgaatcattttccataataaatttagcaatactttcataattagttttatcaataaatccattttgtgataaatatgcaatacctttctttggtgaataattaaataatttaataccttcaataagggaagttttacgttgtttaacagtatcaaattgattaatattatttgttaaatgatcctcagattcttcccttgttaatgaatgattattaacattcgaatcagaatgtgataatggagaaaatggacctgaagcaattgataaacctctattccttacatcagttgcaattaattttaattcatctaatgaaacagttgatgaagaatttaatgatgattggaaaactaatggagatccagaagttatattcaaggtttgtaaaaatgatataatacaatcaattgaaatcattttcaatgcaaaatcatttggaaaatttaataaagaatctggatttatttgagtacttgaaagttttgaagaatttaattcaggaattttttcaacttctttcattaatgaatgagatttttggaaaattttaaaattattcttttgttgtaaagtacattcaactcttaataatgcaaattttgttaaataatcaataattttttcacataaatttggtaatgttgtatcacaatcataatttaaataaaattcaataataattttcggatcacaacataatctacgtataacttctaaaatatatcttttttgataagaaccagaagatttcatttcaccaagtgggaaataaatttcatccatgaaaactggtatttcaaatttaaattcagatcttaaatttttaatcattaaccaataaatttctaatgtaattgcatatactgaagataattgagatgttgcatttcttgaaattgctaaacataaatattttctaataccatcaactaaaatagttgtttcatcactatttttattaaatattaaatgatctttattaacgaaaacatccatataatttttcaatataagatgaataatatgtaatgataagatcttaactctaacttgatgagatctcatatctaatgaatcgacttcaataacttttgatgctaaattactcattgatctgaaaactaaaaatgcatctttaacatataattcatcttcttcaccaataatttcatcagatgttaattgaatattatcattacttgtatcttgtaattgttgtaaagtcattgtattattttcattagattcatcagtatgaattttctccttttctttaattaatttttgtttattatttaaattcattactttaccataaacggaatcaacaatttgaattaatgtagcttgtgcaataccttgattaattggtgataaagataataggaaaatattattaatttgtctaattgcttgtaataaaactttaccatgaacaggcattgattcattaacaattgcaccagttaaaactcttataatttgtaattcaactctttcatcagttccttcaccttcataacatgaaataattacattaattgcagcttcaattaataaaattttaccttcagttattgaaacatctaaaccagtatctaaatcagcagttgaattttttttatttttcaatgatgattgatttaatgatttataatcccaataaattggtttagtaaataaattaaatgtaaaaattttacttaaacaatcaagagctaaaattttagcttcaatatttgattgttcacaagttaattttaatggttcaaaaattaattcctctgatggcattttattagttttcaaaatttctaaaactgttgaacatttttgaacaattatttgatgttttttcataatatctttaatacttaataatttttcaaaacttaattttaagaatgaaatacttgcattttcatttaaatgtgatgttgttgcagttgttgatttacgtttaattggtgtcatatgagtagttgaataagttgattgttgatcagaagtatggatagaattattatcaatagtaacttcatcattatgttcatcattatgttcatcattatgttcatcattatcttcatgattatcaccctctacagtaatttcaattttattaaaagcctctgttggctcttcattattattggtttctattccatcattatcaacattggaatcattcacattaacatcaacagacaaggaatcagatccattgaccacaggtacatcttcctgttcctctattgtcattgtgcaatgcctgtatatccttgctttgcctttattatataaaccaggaggtatattcgttacaatagcagtattcattacctaaacaatttcatcatctcttttttcacattgaaaacaaattcgcgctctacttaaattcaacaggctgattacataatgattatcatttcataactttaactctttattactttattttataaaactatttaaagaaaaaaaacaagggaaatcaaaacaaatgcactaataatactctacaggaaataaactaaactaaactgaactgaaataaataaataatttaaatgataattggaatgttcaaaataaaaaaaaccagttttttttgttttataaaccttcccattttctaccttcaactttcttcaattcttcagttgtatgaacatgtccattagtgaaataacctgcagcaattttagcatcaatttcaactctactatctgcaggtaataaataatcaggtatttcaattctttcatcaatagttatacctgaattaacaattgcatcatgtttcatattactcattgataacattctatcaattttagtaatacctaaccaatgtaaaatatctggcattaattcttgaaatcttgcatctttaacacctgcaatacattcagttctatggaaatattcatcagctgtatcaccacttctctttcttgcattataaactaaatatttagttacttcacctaaacatctaccttcttttctaaaataacaaactaatccattaccacctttttgtgcttcctttgcagcttcaattaaaccaaaaataagataacatctacatgaacaaatatctgataagaaaacatcagaacctgaacattcatcatgaattcttaatgctaatcttttatcctcttttggtaaattatttggatcaccgaaaatatatgcagttataccaccaattggtggacaaaaagttttaatatcaagtcttgaaattaattcaggatacataccattagtatcttgaaataatgcttttcttaattcaatttcagtaatatttaatctttctgcaacaccaggtaaataccaaacaggatcaactgcaattttagtacatgccatttcaccttcatcgttaagtacaattttaccatcaggaattaaattaccctttttaacttcatctttaatttcaggaattgataaaactgccttagtaattgacattgttggtctaatttcaacattttcatttttagaaatattatcatataaccaaggagttaaatgaccaaatggatccattgaaacaattttaccaggaattgaccattgcttttgttgtgggaaatcaaatggtggatgagtatttaaataatttggtttatgattaatatctaattgttttgatgcaatacttaaagcatgataaattgaatacggacctgaatgtgcaccaattgaattatgtttaatcataccatcattgtatttagaaacaacaactggacctctctttaaaggatcagattcataccattcaattggaattggattaatatctgaatcatttgtaaatgtagctaatctaattttatcaccaaagaaatcaataattgcatcattatcattagtattattactatcaaattgtttttcattaatttctaaaccttgttcatgtgaacatgtagtatttccacaaattgttgtcatattgtattgtattgtattgtattaatttctaaataaacttgttaaaagaaccaacatcaaactaataacttctaatttaaaatgacaataccctttccttttatacccatatcatctataccataaactaatacaaataaacgtttaattgcccttttttcactatcagtatcagtatcttatcaataaatttctcatcttatcttaaatccgtatatctcctgataataccgtataattccttataaaaccgtatatcaccactataattaagaaacggaattatacggagtaatattagtattattaatattagtattacttatttattatacaaagatcttacacattgataattggttatattatgattattatgattattatgatgattataattattatgattattatgattattttatgaactgactttttaattaaatttcactatattataagtaaagcgagagaggtatttagtattttttttaatttaatatgaattacattgattattttatcaaatctaaaatttgcattgttaaatttgaaatttcatgattatcattattttcaccagttaaattagttaaatctaatttacctttattaatttcattcttaattttatccttaatttctttattattagaatctaataattgtaaaattgtccaaagtgcaatatgttcaaatgttggattcctacttttcaaaaaatttgatataaattcacttatttcattataattttttaaaattattgaataatcattaattcttgaacataaatttgctaatgcagcagctgaattaccacaaacttctaaatttgttgattttgttaatggtattaaaacatcaattatacccatatttaataatttttcctttaattcatctgctaatgctaaaattgcaaaacatgcagaaatttcactttgaacattttcttgagaatttaaaactaaatctttacatttattaattgcacctgcatttaataatgctaatctatttctttcagaacttgcagctaaatttcttaaacttgaaactgcatgacattgaatttcagtatttgaattataatcaactaaatcaactaaaggttttaaaaatcctgtttcaacaattaaaacttcattcattggatgaattgaaatatttctaatacatgcaactgctgctaatattaaaggttcatgatttgattgtaataattgaactaaatttggtaaaccaccagatctaacaatttctaattgatataaaccatcacttgctaaatttcttaaagctaaagttgcttgacattgaactcttgtacttgaagaatccattaattgaattaattgattaactaattttggttcagttaaacttaaaatttttctattttcttcatcaactgcaatatttgataaagcagttgtacaataatattgaatatcaggatcattacttgataataatttaactaaaattggtacactacctgcatcaactaattctttcctattttcaaatgaatgagtcatatttaataaagcaccagttgcatttctttgaactcttaaatcttgtgacattgctaattttgttaaaggtattaaagcaccagattttgcaattttagttttattttcatcttgagttgctaaatttgtaatacaaccaactgcattacattgaacttcaatattagtacacatcatttgtttaattaaaggatttaaaccacccattttaacaattaataatttattttcatcattaacagctaaattacctaaggcagcacaagcagctctttgaacttcttgatcagaactttgcagtaaaattaaaattggttctaaaacatctctattaacacttctaatttccttttcagtaatttcagcaaatgctaaagctgcactcctttgtaaatcaatattatcagaataaaccagagttgataaagctctaagtggaccatcagagaagaaatctataccatttctattttctaaatattgtaataaagttgtaattgcttcacgttcattctctgctaataattgacgatataaaccagaatcttcacgatttttcaaacaactacatgaacaacccataattgaatattataaatattgataattgattattgataattaataattgataataagatattatagactaatatagataagataagatataattaaggcaattgatatatattataagataataagaatatggagatagaaggaaagtatagaagatatacgataagaatataagggaaagttaaagtaaagttaaagaatgaaaaagaaatgtaaagataagtttaataaaagattctactcacccacccactgataatagaataaaatggttatacatgcatgtaatgaatataataattattatttgcctctgagggaagtgacttataataattacaataaaacgacttcaagacgttcaagggaaaatttttattagttagtacagtacacccccatttctgttgctgtactgttttgtattacgtaatatgtaatacttcacagacgcgactgcattacctaatcacatgacgatatagcaaccgcggttccattgcttctatatcaatttagtatagcaagcgaaaaacatgtacagaaagctaataaactcattaacgaattaatactaaaaataccacaaattgaataatagaaaggagtatctacatatatcggtaaagtaaatgttaaattaaagtcttaaacaaagcaaaatcttaacattaattaattaattatactattaggaattatattttaaaggtaaaaccaccattcgaatcttgtgagggtggtttgtataatttcgtataacatccaacaaattcatttccggatttccggacttgaccgaattaataaatagctagatctttcctttaactgagaaaaactgaaaaaaagtaagaaaaatagcctgatttgccttaattcaataccgttttaatgcgtcattgcttatagatccgttaatatactcaaattgatctaaatcttagtttgatctctaattttaattattttattattttactttttaaacttttctattttattaaaaacatttcttttttttttgttttgatattttaattatggatgctattggttctattactttttttcagtcctttggtggaaattaaaaatacctcttttccaaacatttttaattccttatttccgatctcatcctttaactcaccttatctcattaatctgtaccattaattactttttgcactgtatacttaatttacctttaatataaatagatcaccgaagcttcatttattcattccttcattctttattatgatctttctatctaatatcatcttctcttttttaaaatctttttattcatttactttgtttgtttcatttacttcatttaatttaatttacttcatctattccccccatatatcgctgcttttcctctatatttcattttgtctctcatctcattataaacttttattttatttcccttttcatttcccttttaattccccttttgatcttcatttgatttccattttgttagatcttcccttttaaacttcacttggatctcatccatattttcttattttatcaaaaaaccgtttgttatctttactattatatatattctatatattcaatattctatggatatgaataattatcctatcaaaccttcaaatataaatttaaatttaaatcctaatttaaattcttataatcatgatgcaattcgtcaatcaaataattcaagtgtatcatctcagaatttaatacaaaataaccccgctaatactaccactaatattctatcacctgatcaaaatattcatcatcaacaaacacaacaacaacaaccttatcattatccaactcaatatcaatcctttaccagtcatcctagtcatccacctcatcagcctcattttcaacattatcccccacctcatcaaacttatcaaacttatcaaccttatcaaacttctcaatatccacctcaatatcaatttcaaaatatatctaattctccaataactcctcaattaaagcacaacaatagtgatactagtattaatagtaatattaacactaataataataacaataataacaccaatactaatagttcaactaataataattattccttttataacatcaaattatagtcaatctcatataccttatcaatatcagtatcaatatcaatatcaaaacatttatccaaatatttatcataatcaatcaaatagtataccaaatacaccaaattcaattcaaattcattcatctttaccatcatcaaaaccttcaaatgatcaaaatattgaagaatttaacgaacatacatcatcaaattcaaactcgaatttaaatttaaattcttcaataaatccttcaagtaaacctccagcttcttcaacaactgctacatcaatttcaaatacttcatataataataataataataataataataatactaatagtaatattaatgttaaatctgaaaatattagttatttaccaccattccaagatttaaactcctcaattaataataataataataatactaataataacaatgatactactactattacagctcctgatataatatcaaattctgatatctctaatgaaaaaggtttagtctcatcaagtattaaccatccaccaacaaaaattcaacctctatataataattatccaactcaaccacaatatcaatatactattcaaactcaaccacaacaatcacaatatcaaccgcaatatcaatatcaatatcatggatccacaactccattaccaccacccccaccacaacaataccaatatcaaccaccattattaactcaacaaccatcacaagcaccaccaccaccaccgccacaacagcaacaatattatagaacgaagtgatcagttaccaattcaagcaccacatcatttatcacaggtacaatcacaggtacaatcacaggcacatggtggttattatactgatggttttaataatgtaagttatcatttaattcctactaatgatcaaatagaaattaatagaaggtttaaagagatcatatgatagtaatggtaataatgtaataataataataattatcatagttacaataatcctaatattaataaacaaaatgcaattgccggagttatttataattcaagtgccgttttcaaaagattaaaaccatgtattaatgaagagaaaagtgaaaatttaaaacattatgaaactaatagaacacaaggtagaccatttagtagaaatttaagtggtagatttattttacatgaaaatttgaaaagtttacttaatcaagttgataaaagaagcaataataaatttttagtttatgattttaaaaataataataaaagaaattataatacgattaatcgtaataatccaattaatgaaattttaatcgaaaatttgaaatcatgtattaataataataatagtaatgatttaacaaataatagaatgaatataattaatgaaaattttaatgaaatggaaattaaagttgatgaagttaataattttcttaattgttcaaatgatgaaatacttttaattgatggatataaggaaaaattcaatcaaaagcaaattatgattaattataaatggaaaaaggataataaaattaccaatagtaataataataataataataagaagaagaagatgatgaatatgatgaatatgaggattaaagatgaagaaaatgttgaaattagtaaaggtgaaaattttccatttattaattaagaaaaattttaaattaaaggaatatgttttcgttaaaacaattagagataataatgggacatatacttaaattagagaccgttaaaccgccaattaataaatatggtaaattagaatatacgtccgaatggcttaaacgtagaatttgttatccaagatataaaggtggtatgaatttccatattttgaaaagtaatttcaattttgtactttataatgatttaaagatgcttttatgggatattaaggaagaaataattattgataatagggaagaaaaagaaaactggaagaagaaataatgataataatagtaataatagtaataatagtaataataataaaataaatgatagggatgttattaaagaagagaagaaaattaataatactaaaaatggggataataataataatacaggcacagataagatcaaatccatcattaaaatgaataaaccagttgtagataatgaaattaaggataaattgttcaaaaacaggatactttacattcaaatgttcaatttatgataatttatgataaaataaatctttaatagaacattactcttttaggcagcatttcaagatccaaaccgcgatttctaagattcgggtaattaattaataactctattttattcaactgcttattcaactgcttattcatcgatgttttgctcagatctttctctcatcctgtatatcttatatctctctctcttgggaattttaattgtataatataaatgtaaacaaaaatactataaagtctaatatatattaaactatctaacagtctataatagtaatcgatgccttctttctccttacatgcggtcttcccagccgatcgtccaaagagattacttctttgggaagtattttaaaacacccgagctacatcggagttaaagttaacgtattcatttcatttcattttttaaatggattaattgaagcattgtacgatgatttatttattttttccctatattcattaaccattttatcaattttatcatcatctaaattcaggattatcttcttcaattttatctctaaattccattattttaatctcatttcttttacgtatttcatgtttaattaactctttatcattttcaataagttgtttattattactagtatttcttttaatatctttttcaactttctcccttttgatactatttaattgtctttgtttatattttttaccttcattctctccttgtttactaactctaatatcacctaaatttctttgaatatatcccgatgttgatgatcccttagctgatttaaggaccaataccattatacgacattcctagatgtacttaacttatacttatacttattatcacacaggaaaaaaccccaataacctgacatcaaattattcggtaaacttttttttaagtttcttagtttttgtcttttcgcggagtacctttacggtggcaaatcagttactaatgcaagatactttctttgtccattattatctttctattctattcctttcttttgatatggtatgtctcaacattcaatcagtaagttcttctctaatgtaaagaaggagaaagaattatctaatgatgtaatcttagattgtaataatcctcatacctaataccaatgttaatgttgatttaaaacctaaaataactaaaagaaaggcaaataatactgaaaaatcaacaaaattaacaaattctaataaaaaattaaagagtaatttaacagaatttgaaaagcaaatactattatttaaattaaatcatttaaataaattattacttattcaaaatggttatagatataaatttttcggtaatgatgctttaattgcttcaaaaattttaaatattaaattaactaatggtaaattatcttatgatttaaataatccttcaaaaaatgattatcctttattcaacttttgcttcggcttcaattccaattgaaagattattaattcatgttagaagattaattaataaaggttatattgttggaattgttgatcaaattgaaactgctgctatacgtgatggtaatggtgattttaatgaagatgatgatactttaactactaaaccaactaaatctaaaatttttgaaagaaaattaactaatatctattcacctggtacttttataaatgatgatgatttagaaaattcagttaacggtaaatcaattattttcatcaatgaatcaattaataatcttatatcaatagtaagtgttaatgttttcacttcaaatatagtttatgatgaatttaatgataattttaatagaagtgaattagaattgagattatatcatttagaaccaattgaaattaaaactataggtaacaatatatcatctgagactataaattgtattaaaaatttccaaaaatttaatagcaatactagtcataataatagcaatatatcatacaatcatatacaatcatcatcattatcatcttcaaaatcatttggtgatataatattagaattccaagaaaatgatttaaataatgaaattatttcattcttatcaaatcttcaattaccacttattgaatgcttttatgaacaattccaatacttgaaagaatttaaactctcttcatcatttgaatttttggaaaattataaaaattttagtgatatagataataatataattttggattcttcagttttgaaaaatttagaaatttttaacaatttaacaacatgtagtgaaagaggtacattatttgaaatattaaataatacattgactaaatttggtcaaagagttttgaaaaattggatttatagacctttaatcaataaaaatttaattattgaaagatatgatgcaattgattttatgataaagaaatcgaattctttacaaattgaaagagttgtcaacttgttgaaaaactgtcctgatttagacttaatacattcaagaattcattataacaaatcaaataggagagaagtttatgttttccttaaggaagattattgatatactgaaaatgtttcaaaatgtaaatgatcaattattttcacaagacatttttaattcggatttactctataatttctatcatgattttaagaaattttcagtggatgaatttgataatattaataatttattagatatgatatattcacctgctgcaatggatttgaaatcatcaaataatattaccgactatttcaatgagaattttttcaaagtatgatgaaatacaaacatcaaatgataaaattcaaaatgtttataataaattagatgaagaacttttaaacataagagagaataactaaaaataaaggattgaagtatttaaagataaataatgaaccatatcttattgaaattagaaaatccaacatcaatatcattcctaatgattggattagaattagtgcaactgctaactgtattagattcagaagtcctcaaaccattaaactctataaaaaattgaaaatattatgaagagttacataaacaattatgcaatagattatttgaagaagttcattaataagattaaaacttatcattatcaaatttcaaagttaattaataaattaggtatgtttgatgcacttttttcactttcaattgcatcatcaaataataattataataaaccaaatctagttgatataccaataataaaagctgaaaaattcaagaaacccgatatctgaatatttgctgaaacagaaaacaggttagtatcttcaatcaaaacagtataaagtcatcaagcatatattgagaatgattttaatttaaacacagacaactttaataaaaacaataataagaacaacaataataaaatagcattgaattacgggtccaaatatgggtgggaaatcatcatttatgagacaagttggattaattacaattatgtctcaaattggttcttttattccatgtgataaaaattctatattaggtattttcaataatatttgtattagaattggttcaaatgatgatattttccagggtaaatcaacatttcaaattgaattaatggaatgtaagaaaattttagatatcgttttaaataatgatcaaaataataaaaattctttaattttaattgatgaattaggtcgtggtacatcaacaactgatggattaagtatcgcatggtcagttttatattattttattaataattttaataataatattgcagtattatttataacacatttcaaacaattagaaaaatttgaaaatttaacaaatggtatcgttaaaaattattttatgggttataaattaatcaatgaaaatgatttaatgtttacatataaattaacacctggtagttcaaatggttcatatggtatctattgtgctaaattatctggattacctgagattattgttaatagatccaatgaaatttccaataagatggaatcaaaggacattttaaatgaacttaaaaaagttaaaaaattaattaacactaaagaaatgtataaattacataattttacagaaagtttatagaaatatttatagatagattaatatattattacattttaagaaattttcttgtgattgtttcaggttgtacagtataagttatatcacctaaatctgaaccatcaaatttcattacttgagaatcatcatcatgaattatactaattgaattaaaatttttgaaaggatcatcaacatcaccagttttaacagttgaattactatttttccttttacttctaagtgtacccattgaagaattattactttgttttttaatattttgattaatatttttcttctttttattattaattacaggtatcattggaggtttttgatttcttaataaagcccattgaatatttttaaaaaatggttgagctttaatttctgatgcaccagaatgtgaacctaatctcttattttcatctttaattaataattttttaattaaatttttacaattatttgaaatttgattataatcagggaatgttatatcaatttttaaaatatttgaaaatgtttgatttctagttgatcctttaaatggtgttataccaaataacatttcataaatgaaaataccctaaagtccaccaatcaactgatgatgtatgacctttaccccaaataacttcaggtgcaatatattcctctgtaccaacaaatgaattagttctaaatccattaatacaagcatttgtatctaattgtggtaaatttgttaaacttttattagttgaaataaattcaggatttgcagtatttaatgattgttttgataaatcaaaatcacttaacattatatgacctgattgatgtaataaaatattttcaggttttaaatctctataaataaaacccattaaatgtaaatattctaaagctgcaataacttcacaagcataaaattttgcatcattttcattaatacatttcatctttcgtgtttgtaatgctttaaaaaattctccacccatacaaaattccatacataaatataagtgatcatcactttgaaatgaatgatataatggtaacaataaatggatgatttgcagttgataaaatttcttgttcagctaaaactcttttaatctttttacgttcaatcatttcctttttatttaaaattttcattgcatataatttcattgtttctttctctctaactaaataaactttaccaacatctcccttacctaataattttaatttttcaaatgattgtggtccaacttgaatatcagaaattttaattgaattacttgaataatttctttttgttaatgctggtgatattttagtaattttaatttcacctatatgacttgtcagtgaatcaatattattattattattattattattattattcagactattattattatcatttaaatgattattactatggctatctgcaaaagctcttaaacttaatggagctgatgcaacttttcttaaccttttaggtaagaaacctctatgttcagtttcatgttgttcctttaaaggtttcaattcatctctaacttcatcacttaacatcatgttgattggtgttgatattattagctgtgttatctttagtatctttcttattatcattactagtattcatattttcgttattaatttcagatttttcattcttttcaattttttcaacctttttatcattaatttcatttgttgcaatttcatgctgaagttgatcagttaaatctaattcatcaattgtatcatcatgtttattaatattatttgaatttttcaaatgtgaaggacttgaaggagctctgattctcctaaatttttgcattaatgaaggtgtaaaatcatcatttatattattgttattatttatatcatcattgagattattactattattattatttatatcatcattatgacttatgatcagtaatatcattattatcaggttgattatcatttgaattcagtatttcattatcaattaaatcatcatgagctgaaaatttgaacaaatttctaattttagttaatcttcgaggtcttacaaattcatcatttggaagtatcatcatgatcatcctttgaaggttcagtatgtgccgtattagtgttattattattattatcattattattattattattatcagtaaatgaaaagtagtctaggtttttgatgttattatcattattaaaagttgttgaaggagtatcataaacagtaccttttgactcagggggagtttgtaaaaatggtggtatttccgtagttggagtaattttgttgtctattatgttattatttgtagtaatactactactgttattattattattgttattgttatcagaaccaaattgaaataatctaccaatagataatttccttgaatttgatctggatcttgaagatttttgttttattgttgatggttgttcaaaattattcaaactagctacttcatcaagttcttgatcattaatattgatattattatgcatatgctttggagatgattttaaatctgatatattattattattattattattattatctgtaaatttcggcatcagaatatgttgaataaattttatggaggaaatggaaagtacaaggtggaacaaaaatacaataagtaaggaatgaggggtataatgaagtgcaatattataatggaaatatgcaagtcttgttgagtatcagcctttgaaagaagagagacgttcagaagaagaagaagataataatacctttcaaagtcagagaaagataacatgatcaacaatgcaaattttcatagtggtgaaaaatttaaattttttccaggttttcatagtaaagtttacagaacaagtgtattggattatgattatatggttatttatatagagttatgtagagttatatactagtttggtagagtactatattatttagcaagatgtggaggaagtaagaaacttgcaataccatccttaatatagtaaacatgttgacaattatcacatatcattttaccttcaataatttgagtttctaataaaagtgaatgtaaatctttaagtaaaacttcatttatatcatctaaggaaggtttttgaggaggtattgcattattacctaattgtgatgcaactttaacaagagctgaccaatctaatctctctaacattgaaattataaattcttcattaaattcttgttcctctaattgtaatttacaatcttggaaatttaatgggaatgaaccttcagtaccatcacatgatttaactgcacatcgcacaaaattacttgttataaacttcattgttatcctatacttggtatatacactctactagaaagagaataaaatataagattatggaaataaatccaagggaaaaatcaaaaatatttttttcttcacgcattaagtcgaactgccacggtgaaccttccttggtgaaggatctatttaccattttaacgtgtcttggggcgtactgtacgtccaaccgataaagataaagtgcatttgaaaacactttatgggcttcatgtattatttcgtcagtgttttcatatgaaggaatataacccatataatcacaagctgtttcaataatacgtttattatcatcagtaagttctactttcggtggtaaattaattaaattgtagtatgcttttaaagtatcactatgaacgtattcatttggaattgatgcaatagcagctgttaaatcatcaccataatccatatcaaatggactatagtatttattatcaataattgtcttctcttctgaaagttctgctattttatccttaattaattgtttaaatttatctaacccatagttagacttcacagctaaaactgggagtgaagagacaatattttcgtaatatgttgatctatcattttcatcaattttagaaacatatgctaaatatattttagcatttgcaatagctgtatataataaagtttcaaaattactaacttcaattctaactctacctttttttccagataaattcccaaattgttgaaatatttttagtgtacctggtcttaacttgtaatcaaatatagtcaaattttgtaaaccgtaatattcaaaagactcaaatttagacgtcgtaaatatttgtataataaaatgaatttcacatattacacgtataatacatttaaacttttgttcatttacttgtccttgactatgaaaaaaaggacccggataagtaagaattagcattttttcaacgatacgggaaaccaaatcagtatctaaagtgaaatatctagttaccgtttcacatggagccaaacataattgagacaaacataattgagtgagtaatgctttgttatatggagccattaatgattgaatatactctatagaaagaaagacatatagataaagataatataaagtcaaatttatgcagcacaatgtaattaaaatagtgcttttcctcactacttataatattatttacttactgttgcaatctctttgtaagtaaacccaactcttttctagcaccaatactctttaattcatcaaatactctatatcgtatactagattcttttaatgtgcctattatatcatctgaattgttcattaattcaatgaatgaagtcttagtttgtttattcattgccaatattttgataacttgtaaaaatctattgatatcagttaaatattgtttaagccatttagatatattaattaatttatgtaatggtacagtagttgatatatttgaattagtattctttttagatttctcatatcgacttataattttctgtctaatagtcagtgttttgtattcagttggtgaatgtgaaattaataatcgtcgtaaaagtatcatttcttgtgaatataattgtgcttgatgtaatttattgaaaaatgtatctgttattttattaacactctctcgttgttgaattgttgtttctattggcgctgaatttgtgtttaatttgatgatttcttccattatattgttaatagtattcatattattatgggtataaatattatttgaattaattttagtagtaatgttgtttaaggataaatcaaattctgaaactattttagcttgggatggtataaaatccaatttagtaatttcttcaattttattagtattttctttattcttactcttatattcactaattctattatcatatttatcatatttaccacttattatatctaagaaattaatatttttaataattaatccattatttgcaacattaaatgatgattcagttaatgtatcatcatggaaaacttcaaccttagttgtatacatttgaataattggaggtaataacataaaaaatgctaaatgtgaagtatatgaaaataattttaattcatcatatgtattccatttccttgtctgtggtgattttatattaactcttttattaaaacttaaattaaaatttaaattatgaaatgatcttttaaatgaaaatttattaaatgatgatttgaatgatgatgtatatatcgacctaggtttaaacccattccacgagttcctaaaggcacccatgtatgacattatagaaggttgtctataagaaaaagatagaggttgctaataaaataaaatgtggtgtgtttattatattaccataacaatttttactcgctgagttaacatgtaaattttcatgtaagcttaatcttcactttaattggctgatagtatattgattatagattatacaatatcacactatgttaggactttatttaacagcagagctaaacaatgttacagatttaactacagaggattcagtcaatgaaccatttgaatattttttcaaattagaatgtaccaaatgtcatgaagtacatgataaattagtttcagttaatttatacgagaaacatgaaattagtggttcaagaggtgaagcaagttatgttagttcatgtacattctgtaatagtaaatccaatttgaatattcaaataccgaaacattttaatggttatactaatgaagataataggtaaatcagttaaaatacttgaaattgattcaagaggttatgaaattgttgaatttattgcacaatcaccatttaaatgtaaaggattaaatagtgaaactgttttcgataagatagatttatcagaaaatgaatggtatgattatgatgataatgcaggtgaagaaacttcaattactgatataaaatgggagattaaataataataatactttcaattctattatcatctattctaattcatttttttaaaagttttataagtttttatatttattatactttatttatttaacatatattaattataataataatatttaataatatttaaaaatttaatttagaaagcaagtttagtaaagaaccatttatttttaccagcttgatgtctttcttcgaaaactttcttaacggttttctttgcatcttctctttgagatggttcatttaatgattctgcggtaacagctgccttaaatggttcaacatcaaatgaatatctagttggcattaaatgattataattaactaatttaacaaatggcttaactttagtcttctttgcaattttctttgcacccatacctttagtaacttttaatggagctctttcaacacctgcaacaattgcatgtgggaaagggttagcctttgttccttcatcaaattgtttaacaataacaacttttttaccagcatttctacctctaacaatgactgcaactttaccagatttaatgaatttagccatttttgtgtatattaaattgaactagttatagatgggtaaattaaaaaggatttaatagaatttaacagaaatatattttaaacaagtaaatattgaaaagtaatgaaaaatactataataattaattgataatagtaagtgaataatttcagtagtaaaaacttcacttgagggaaactggaaaattttcagtctctgagaaagtggcgaggggagcgctggtgggggaattttaattttactgggggaatcttcaatgggtcactggaggggaccaattcgctgcttttttttatttttttcgctcgttcgggcaaaaagggctggaggttgagccctatagtgggacacgtgacacgggggtgctaggagtttattttagttagttatagttatgatgattattatcaatcgattattaaataaaatacacaattatttaaacctactacgtgctaggaacttggaattgctactattgatcttcttatcatctgtgataccaactcctgcattaacacttgccatagatactgctttattaacagctgcattaatcattggattactgtaaatcttcttagttgtcttcttcatactactctgtttattactactattattggtatttgctttgttatgtagattggtatttgagttacttttagtatgacgggatggaattggtggcggtgttgcacttgatgtatttgtagatgtagatgttgaattacctgtagatattggtgattgtttaacttgtttaatattagaatcggtattagttctcaaagttgtaggaaatgcaccttgtttaacattattattattaatagtagtagtagtagatacctctgattctttatttaccggaatcttaacagttgccaatgttgcagctgtaaatgcaatttcatcaacattatcattcccattattttcatttgatgtaataaattctttaaatttacgatctttttccataattcttgaatttgctaatactacttgtccattgtttaacctctgatttttcaacttgtaaaattattgaaatagaatttgaaataatcgaaaataaaccttcagtaatattaatttttttatcatttaaaacttcaacaaaattaattaaattacttgttaaatcaatctcactcgtaatttcatatttatttaaattatctttaactccacgattttcctttaataatattgctcttccaaatgttgtaattattaatgtccttgtataaaatttagtatctaatttaggtaaattagcatttgcaggttgtttaactgtgaaaaaattcctaaatttattggaaactgataaatcattttcattctcattatcattatttgtattatcatcatataattcattacctattatatatttattaatatcaatatcatacagtttaatactttcactttcatcatttgaaaataaattaatttgtgatattttatccttattcttataacctaatggtgattcaattataccacctttatattttttctcaaaattatgtattaaatcaattgaaacttcaacaattccaactttcattatcctttcatcatgattcttaataaatttaataaattttaaatcaagtgctgacatacttggtatttcattagttttcttattaatattggaattattccgtgatttactaccattactatttaaatgattaatgttagaattatttcttgatgcaatcttagtatttaatacaggtcttggaatattagtaccaggaatcacatcaattgaactattagaggtatttggagcttgttggatattattattattggtattactgttactgtgttgttgtcttgatttaactattttatcagcaatttgttgttgtgaatctaattttatttgataaattgaattatcagattcacttcttgatgatgttggtaatggtggtttagatttaagattaccaccatataatgcagtcgatgctgcactactagccgaacgtttctttttttgtataacagctgagtttttcatagctggtgaatttttattgttattattactcttatcattatttggtgtaccaggagtaccaggtgtacttggtgttgaaattgatctttgcttcagtggtttaatattatttgttgaattctttatatcactagatgttttattccttttaacatatttaatcttattaccagtattttgatattgtaattctaattcgggtattggtttcattgaaattgcacttattttataagcactcagtttaggtggatttttttcccaaatttcatcttcgttattccagttaacatctttaaaccaataatgtctcttaatttcattaattgataatctatcatttggatttaaaattaataatcttttaattaaatctctaataacaattgggaaaccagctgtaaacgcatattgtaatttttgaattttttgaaatgttaaatattcattcgttgccttaaatggtggtttacctgcaatcatttgataaattatacaacctaatgaccaaatatcagcagatttaccacaatatttattaattaataattcaggtgaaacatattcagctgtaccaacaaatgaatttgctcttgtatctgatggataattaccagttttatcatctttatctaataattttgcagtaccaaaatcagttatttgtaatttcaaatttttatcaattaaaatattttcaggttttaaatctctatgaattacaccatttaaatgcataaaattaattgcatcaattaattgaattgaataatattttgttgattcttcattcattgtaccaaattttttaattaatgataataactctccattttcagcataatctaaaacaaaataaagactttgactatcttgaaatgtaaaatgtaatccaattataccatttcttttacctaatctatttaaggtgtttttttcaatattaacatatttaacttttttctccttaattatatgtcttttattaagtatcttaattgcatatttattattagtattaatatcagttgctaaaactacagttgaatatgaaccttcacctaattctttacctaatttaaaatctttgatacctttacgaataactttagagttagttataataattgcatcatttgatgtgttggtattggaattactaacattactaatatttgaattattaattttcagttgtcttaatctttcaacttcttcatcatttaagtcatcatcagaatcactttcatcggaatctaattcttcatctgcttgattatcattcatttgagtataatataatgtattattagtatttgaatcttcctccagacttacttcatcattatcattgataatatcatcattattataactatagttataactgttattattgttagataatggatcaactatatcaaaatgatgattatttgaagttggagttttcaataaattattattagttggagttgtcggagattggaaaagttggattatattcattgaattttggagttttaataaataattgtgatgtatcattattgttggtgttttggttattattattactatttacgtaaataccttggaaatgatctataggagttgggattggagggatctgatttttattaaaataataattattattagcgttgttcatattgttcatattgttcatattgttgttattattgaccaaacgatgaatgttatcctcaatagagggatcaactgattgttcataaacagcagcacttgaattcattgattgagcgtttgctgatacgattgaattatttggagaatctaaataatcatcatacagatcagagtaatcttcaatttctgcagacattgaaggatctagagatgaataagtgaacttttgatcttgaaaattattagtagattgatcctgatatggatgatttgacatgaaattgcgatatgtagtaaattagaaaacaaagaagtagtaatgcaatttatatatgatatgatatgaaaatgacgagaaaagagagtggaaaatagtcaatgaacaacgttaatacaaggagtatattgtattatagatatgaatacgtatatgaatagataaaacgataagaaagcatcaattggaaagtaaagtggtgatgatgcaaaggaagaaagcgaatttccaagggagtgagaaaattgaatggcaaatcacttattatatgggggagaatgggcagaaagtgttgtgttttgttatttgcttttgaggagtataggttgtttattgagtatacaacatgagtcgtatattggttgatagtggtgatgtagagtcttatggaatgtctgtagttgacatagataaagaagaggctggtattggtagtaattgtaatactattaagaaggatagcaatgataataataataataataataaactggggttttataggaaattaaagaatcgtatcaccaaaaggtttcgtagagaatataatagtaataatgatatgaatagtggtagtaccaatagttataatattgataatagtaatgaaagcactacaggatttagtggtaatagtagtatctctaatgatattaatgatagcaatataataattaccaattatagtacaagaatacgtggtagattatattattataacaatggacaatattttgataataatcttaatgaatatcaactgtcaatacctagaacaagggatagtaatatgacaatgattgtatcacctaattggaatacaataccaatacgtattgatccaccagtgacacttgaacaggaatcagttaatagattatcaactacaacaagggaacatccaccatcattatttgcagatgttggatcctcatcattaaatcttagtgatgaatcatcaacggaggattcttctacacaattaacatcttcatcaacggaagataattcatcatcctctccatcatcagatgctgtatcatcaatggaatttgaggatggatcatttgaggaaggatttacagaaacagttacaggattaacgagaaccatcacccaggcagccacccttgttgcacccaataccaccaccactagatccacccaatcaccatcactatcaccatcatcatcatcatacaactcactgctacaatcaccagaatacctctacaagagaacccaaagtgcctgaaatcaatatctattaggtaagcccttagtaaatttttaagaaaaccgcgtttttcttagttaactcctttcactatgggcattttttactttattgtattgttgacgtggtgctgtgattataagctatattacagggtgtgtttcatattggaatcatattataataatattataattatctttttgtccacattatacatcaatcttcaacaccatgacaaatactatgaaaatacatacaacggtccatcgtaaaagtggttgggttaatgttaaagatgatggaattatctcatttagatggccaaggaaatatctggttttaactgaaaatagtttagatttctttaaatcagatgataaacatgaattatggttaagaatacctctattacatattctcaattgttttagaaatcaaatgaaggataattgttttgaaattcaattcaaaggtaataaatcaatttatatatcaacaaaatctgataaagaaatgaattcatggattgatttaattttaactaaatgtccaagagaaggtttttcgaaacctttaaaagttactcatgaggcaaaagttagttatgatgcttcaaatggtacttttaaagttaaaggtataccccctgagtggttagctttattgaaaggttcaaatataacttatgaagattttgcagctgatccatcagctgttattgacgttcttaatacttatagtgaaatggttagtcccgaattaagtcattcaaataaatttactaacaaattaaaatcaaatttaaaatctcccctatcgtcattaaatacacaacaacaacaacaacaatcatcatcattatctaattcatctccaccatcatcatctggtgctacatcttcaaatttattaaatgaaataacaaaaccttattctgataaatttttacaacctcgaagagctcctccagttccaaataaagttaataatcttaatgtttcatcaaataatagtaattttgtaccaactagaaaagcaccccaaatacctaatcaaaataacaataacaataattcttcacaacttaataaaccatcatcttcaatacctccaagtatcccacctccactaccaaattcaaataatttacctgatttaaaaccattaaaattatcaaatttgaaaattaacacaaataatgatataaattattccaattcaaatccaagctccgcatcttctaatggatcaaataaaaataatatcgaattacctttgcgtcaagcaccaactcaaccacgaaaaccaaatcacatcctacaatcaaattataaacaaaacataaaccaaaatcaaaatcaaaattataatccttatcaacaaatagatactattccaaagagagctgcaccaacaaaacctcaattaccaactcaaaataatttaccatcaacaaccacaccatcaacaacagaaataccaacaacaactcccactacaacatcatcaacaacaacaacaaaagcaaccacaacaaaaacaatatcaacaacaaccaccacagaatcatgcacaaatgagtgcacaagctaaattaatgggtaaatctaataacaataatttaagagcacctgaaagaccaaccgataagagaatatcaacaatgacagagagtcaaataatggcaaaacttaggagtgttgtcattaatgcaaatccggcaccatatttccaaatattatctaaagcaggtcaaggtgcaagtggagaagttttcttagctaaaagtaaaaaaatgaatggacaatgtatagcaattaaacaaattgatttaagtaaacaaagtaggaaagaattaattgttaatgaaattttagttatgagagattcacaacatccaaatattgttaattttattgaagcatatttgaatggtataaatgatttatgggttataatggaatatatggaaggaggttcattaactgatataattgataataataataataagattacagaggaacagattgcatgtatttgttatgagacaacaaagggattacaacatttacataggaagaattttattcatagagatattaaatcagataatgttttattagataaatatggtaatgttaagataacagattttggattttgtgctaaattaactaatgaaaaatccaagagagcaacaatggttggtacaccatattggatggcaccagaagttgttagacaaaaggaatatgatgaaaaagttgatatttggtcattaggtataatgacaattgaaatgattgaaggagaaccaccatatttaaatgaggaaccattaaaggcattatatttaattgcatcaaatgggactccaacattgaaaaatccacaaaatttaagtaatgaaataatggaatttttaacagtttgtctttgtgttgaagttaaatttagggcaagtacagattcattattagaacataaatttttcaaaaaggcatgtcatacatcacaattagcaaatttattaacattcaatagtaaatagtagatagtatagatttatagatttatagattaataattcattcagtaattaaaccattttcataatcaattatgtaagagaaataattttttgataataaaccattttcattaccaggagttaaataaaccccattatttgaacgatataaattaatttcatttgagttttgttttaaaagtggaatatttattataattataatttcacaactatttcttatacctgaaattgcattattattagataatgtagttaatgaaaaatttgaatttaaatttaaattatttaatatattattaaattttaaaggtattttatcagttaaatggatatgatttcttaacattttcgataaaccaccagaatttaaaattaatggtaatttatccctataagtaccatgaattaaaacatttggccaatccgaatcattatttaataatatcatattatgagtcataccaactgattctatactatgaccttgtaatgcagcaattaataataatccattattaggatcttcctttaagatgaatcttttcttagaattattattaacaattctaattatatcatcaattgtagccttatttgatttaataaatttatgatttaaaacttgattaattggtatgaaaccattagaatcaattgaaagaccatccttaagagcatgatgtcttaataatttagctaatgctttaccaattataatatctctcttattattttccattgtatgatggatctgtataataataataataatctactgataagaaaccctgtgagtgaaaaatagaaataaaaataaaaatacgtcataaaaacaaaataaaaaataaaataaaataaaaacacagtcggagaaaaaaccgttgaatctccgacttccgtaatcccgtgttcctacgaacaatcccttcgtagaaacacggacagcaaaaggataaactcccccaccggacaaatacgttccacctattgagacaattattagaacaataaccaccctctaccttccccccgtaattgtacgtaatcttcccccgcctgtctaactattctctcaccttgtctctccactccgtatgtccttattattttattaggtgccttaatcggggatctcgtgttggtatccctaccagggaacttgccaggtttttatctatataaatacctctaagtttcccatttcaatagtatctggatcaggaggttgatattatacaacagttttatatattcattttttaataaacatacatacataaaatgactatagatccttgttgtgaagttactaaaacaccagtcggtgaagatgctaaaattaaagttgctcatgcaactagattatctgcaaatggtccaattgaatgtgatttatcaggtttccatttacttaattctcctcttttcaataaaggtacagcctttacattagaagaaagaaaagcttttgaattagatggtttattacctcctgttgttaatactttagatgaacaagttcaaagagcttataatcaattacattatttgaaaactttattagctaaaaatgatttttgtacttcaatgagacaacaaaataaagttttatattataaattagttcaagaacatattcgtgaattaattccaattgtttatactccaactgaaggtgatgcaattatcgcttatagtgatagatttagaaaacctgaaggttgtttccttgatattacaaaacaagatgaaatcgattcaagattagaaaaattcggtaatgataaagatattgattatatagttatatcagattctgaaggtattttaggtattggtgatcaaggtgttggtggtattagaattacaattgcaaaagctgctttaatgactttatgtggtggtttacatccaggtagaacaatgtcagtagttttagatgttggtactaataataaaactttattagaaaatgatttatatcttggtcttaaaatgccaagagttagaggtaaacaatatgatgaatttgttgataaagcaatgaatgcaatgaagaaaagattcccaaatgctgttgttcattttgaagattttggtgttacaactgctaaacctgttttagatagatatagaaatgttttaccttgttttaatgatgatattcaaggtactggtgctgttgttatggcatcaattactgctgctttaaatttaactaatagagatttattagattgtaaaatcttaatttatggtgcaggttctgcaggtttaggtattgcagatcaagttgttaatcatatggttattcatggtgcaacaaaggatgaagcaagatctaaaattttctgtatggatagatatggtttaattttaaaaggtatggatactaattctcctgctcaagaagcttatgctcatgatccaaaagattgggaaaatattgatactaaaaatttaattgaagttgttaaaaatgttaaaccaacaactttggttggttgttcaactcaagctggtgcatttaatgaacaagttattaaagaaatgtataaacataatccaagaccaatgattttcccattatcaaatccaactagattacatgaatgtttcccagaggatgcacttaaatggactgattttaatgcattagttgcaactggttcaccattccctccagttgatggtcatgttataagtgaaaataataattgttttacattcccaggtattggtttaggtgcagttttatcaagagcaactgaaatttctgatagtatgatatctgcagctgtcgatgaattagcttcattatcacctgcaaaagtaaatccaaaatctggtttattaccaccaattgaagaaattcaagaaacttctgctcgtgttgcaactgcacttattttacaatctataaaagaaggtcattgtcgtgttgaagatgaagaatctcctgatggtggtaaagttcatgttccacgtgattttgaagaatgtttagcttgggttaaagaacaaatgtggagaccagtttatagaccaatgatcaaagttaaacattctaaaaaaattcatactcatcaatattaaatttaatatttactatctattctctgtttttctatctatctaatattctattctttgtatcataatcataatcataattaatatcataataatctctcttatcgtgagaacttcccaataaggcaactggatgcggttatcttacagactcgttatgtttccacaaatttcatgatttttattttcatgcttcgaagtttccccccacttattactataaaccactcttcttcaagacaacccacaatgactatgaaattaccaacaattgcaatagttaattctataccaccactccctggtacttcaataactataagattatcacttcaatcaacaagaccattacttgatgaaatccttcaaaattctcaattatctccacctacacataaatcgattactgaagtacgtaatgtattgaataaacctaatgaaaagccaattaaattgattaaaagtaaccgtggttctaaattggaaacattccccgttattgcttgtgttagttatgatacgattaataattcgtttggtaatgttggtgtaattgtggaaatattgaatattaatttatcgacacagaattgcgtgttaactattcgtggtaaggaacgtattggttttgatgaatctttgaaaatggtatcaaattataatggaaatgtggaatatattggaagtcataattatgagatttttaagattactgatgatgttaatactgatggagtagttgaaaatctattggaaaatttacaattgataaaatcatatgttaatgattttactaaagttgatgaaccacagtttaaaagtattttacaaaaactaaatccattatctgagataatgtacattcaactttctgattcatcaaaactccttcaatttcaaaacttcgagaaagacttgaacaaatcattaaatactacattattattgaaatattgtgatctatacgttactttatttccatttacttataaacaacaattcaattacttaaattgtactgaaaattcatcaagaattgaaaattttaaacagttattgtccttcgttaatgtattatttacaaaacacttgaatattgaactagtatatgaatcttggactcgtttaggtcgtcttaataatggtcaatacttacaatcaaagtttattgttaatcaatttcgagcattacgtgacttacttgaacttgttgaccctggtagtactaaggataaaagaatttctactactacttctactaataaaaaatctaatatattcaatacatctcacacaaacaacacccataataataagaataatctcattgatgatgatgaagaagaagaagatgatgaactaaagtctattaaagattttatttccaaacttgatacaattcacatttcaaaagatggtaaaactttactgatcaaagattataaaagattaaagaaaatgcagaaaactactgcagattatcaacaattacacaactattttgatatagttatggatttaccatgggaaagtgttgagcaatctaagtctaagaataatattgatctagagaaagcacaaaaaattttaaataatgatcattatggaatggattcggtaaaggaaagaatacttgaacatattgccattttgaaattaacgcaacaaagtgaaaatcctaaacctaattcaaaggcaccaattttattattgaatggaccacctggtgttggtaaaacatcacttgcaaaatcaattgctgaaagtttaaattgtgagtttcaaagagtttcattaggtggtataaatgattttgcagatattaaaggacatcgtagaacttatgttggttcatttcctggtttaattattcaatcattaagaaaatctaaaagtatgaaattagttatattacttgatgaaattgattcaatatcaaatagtaataatttaaagggtaatcctgaagctgcattattagaattattagatcctgaacagaatcataattttactgatcattatattggatttccaattgatttatcaaatattacatttattggaacatgtaatgatcaatggagattaagtgaaccattaagggatagaatggaaatattagatttagatggttataattataaggagaaagttatgatcggtaaaaagtatatattaccaagacagattattagaaatgaactgaaaaaagatcaagttttaatcaatgatgaagttttagaacagattgcagttatgtatacacatgaggcaggtattagaaattttgaaagattaattgggaaaatttgtagaaagaaagcagttgaattattaattgaaaaaaatgggaaatattgttcaactgtgacaaaatcagatttaattaagtatcttggagtaccaataagttttacagattctgaaaaatattcatcaactaattcattaattcaagatgattttggtatggttcatggattatcatataattctgatggatcaggatcactacttagatttgaaatggttggtgttccaggaaatcaaaatatttcatgtactggtagtttaggatcagttttattagaaagttgtgaaattgctgaaacattagttgaacatttaattcaaactcatctatttattggatatgattctcaaaaattaattgataaactaaagaatacaaatgttcatatgcatgtacctgaaggttcaattaaaaaagatggaccatcagctggtttaactatgacattatgttatttatcattaatacttgaaaaacctgttagtaatgaaattgcaatgacaggtgaaatcacattaactgcaaaggcattaccaattggtggattgaaggaaaaacttttaggagcaagtttatcaggtaagattactaaagtcattgtaccaagattaaatagaaatgatttaattaaagtatttgttgaatcaatacctgatcgtttagagtcaaagatgttattaacaaagcttgtattagatgaggaacaatgtttattacataaaaataaaaggtataagtttgataaaattgttgaaaattgggttaaggaagaatatggtgttgaaattaaatatgttgatgattttatgggtgtaattgaacatgcatggaataatgaaattcaattagttcgtaaagaatccagagcacatttgtaataatataataatatataatgactatataacttataaataacttataaattatttagcatattgagcagtccattcacgagctgtttgaattgccttatcatgattatttttccattcatctgcaacttcattagctaatggatcatcaggatttggtgaacttaataaagcttgaattgataataaaattgtacgaatttgtaatgcaggactccaattattctttaaaacatcaagacaaattctacctaatctatcaatatttggatgataaatttttgttaaaaatctaaccattggtggtgccattggataatcatctggtaaaaaaagcttctagtttgaaaactccattctcatatggtgaacctgatggtccatctaataaaacatcaaaataacgtaaattctcttcatgtggtgttgccgttattccaggaactggatcagatataagtctttcagtttcctataaaaaaatgtattgtaaacttaatgttagtatattttgaacttaataatgtattttaaaaaaaccttcctacatactctaataattctcttcggtagggacgacatcctgattgggtgtatataagttgtataggtagtataatgagagaaagaagtgattgtcagaaaagaagatgatgatcattaatatcgtttagataaccagcgagtcttcaaattatatacgttacaccttaaagttatagttaccatgattctttttatggaatttatcactatacatatttgattacaagtacaaataatatgtccaagaaaagtgttggcggtagattcaatgtacttagtataggtcttgtctctgggtttcttattggactttatatgattaaagattatgaattagttaaatattcaccaccaaatcctgaaaattttgatgaagatggtaattggaaagagaaatcattcatcaaagtacgtgtcgccaacggtgttgcaccattacaaaagaaacataaacctactgataatgaaggacaaggagaggtgcaagtggaagagaaatagttgtacatgtatataggtatgatatagtttggatatacttttaaataaaaatgttttatagatgatatattaataatgataataaagtaatttacataggattttgatgattgtaaccttgattttgattttgattctgtatttgagtttgtagttgtgctttatttcttgcttcagcttgcattttagcttgaacatgtgcctgttgtgcctgcagttgagcttgtgatagattttgtgattgtaattgaccttgttgcatttgagcttgttgcatctgagcttgttgtatctgtgcctttcttctgcatttgcatataagttaatgcttgattttgtttcattgccattctttgttgattattcttttgatgttgtgatctaacatgggaaataaatttgttcatttatattttcaacattcataactgcagctcttgcatacattttacctaatggattagtttgtaatcttggtaataaattagttgcaaacatttctctcattcttaaatatcctgttctcattttaacaggtatacaaacattttctctctaatgggaatggaatacttcgacgaacacctgctaaaacttgtctagtttcctcttcatcatctaatgcaactgatgatccatgtaataaatcatcttttgcttgttgagctgcagctgcagctgcaccaattttagcttgatttttcctttgataagctgctaataattgatcatatggagctgaacgacctaaaactgcacgttttgcacccattgaatgtgttttacatgtaagtgaacgtgcacaaaatcctccatttggtaatggtacaccacattgtctttcaacatcaacgggtcctttgtttttcgacttaacagttttgattttagtttctttctttttcttacctgatgttgtagaacttgttgaatcaattttaactttcttcttatcaggttcaacatgaatctttcttatcattattagatttatcttttgttgcttttatcttaattttcaatttttccttttctgaacccttatttgatgacttatcctgttcttgtcccttatcttgtattttatcttccggtatttcactctcttcagttaaatcctctgtatctgcttttctcttatatccaccttttttcccatttccgtttatatttcctattccatttctatttccattcacagttccattcccattcttacgttcctttttatcgacttcaacagatggacttaaaacatcatctaaatcaataacaacagcattattactattactaatattatttttatttttgttattattctgattgtttaaattatcacaattttctaaatgttcaagtattttatcaactgaaatcgccgtaccacaagctattacatattctataatttatacgatcatgtaaattactatcactcgtgttatttgtcgtgttattattattattattattagagtctatgaaggatccgaatcctctccaatttttgatatctggtattgtggcatcgttattcgatatttcctttatattagagatactcttatccaaatcactcccgagtgatttctctattagttcacgtgtggcgtatctactcattactcgtgtgggttagtttcaactgatagaagtgacagtacagcagttggaaaaattgtgtgaaattttaattaggtaatatctataaaatatgagaaattatgtaataagttttctcatataataatctagcataaagtttacaaataagagatcaaggactggtttatgctaagatcaaataaatacataatatatcagattattataaataagaggacatatccctaacaatacttttatatgttatactatatggtttagttctattactaaccaaaactatatattgtgtgtagattatacgaataaatattataagtcctaactaaaagtccctcaccacttatctcatagtttttcatattttatagatttacagtctcggtgttcttaaggtgtatcattaaatagatatgaaaaacttaggtggttaattaaatgaaaataacaattaaggtttacaaaataaatcaaaagaaaaatatccggttataaaaattattaagacaattattatgaaaataagtccttcaagttttggttcttcgtatctacacacttacaatacaaatttactattcaattatggcaaaacagattatcaattaaatcatattaaagcatttattaagtgatatgttaaaagaaaaattaaggctcatcattatttcaataagagcaatattatattaagccaattatcaattattaaagcactgctatatgtcaattcaattatttaaagaaaagtcaattactattatgaaattatattattaaaggaaaattattatgtcaattatctattatcaagtcaattactcaaagaagtttattattacaattacaattattatttttatgacaattattattataccttagaagaaattaaggcaagtttattacaatttattactgaaaagtttattattatgacaattaattacgattattatgacgacttattgttaagatcactatgatttatgatcaattatattcaattatttcaattatttcaactatttcaacttacactgagaatgacatatagtgcacgtagctattatcagggaatttacaactatttattaggaaagaacacccccattatcattatttatttatttattaggcagaaggcaccggttttatttacaatttattaaggtattattataggtaatatcagttatcaattattataaagatgttttatcatatacatcagtattactctaatcaagatcattactaaaatcattattattaatattaaacaatcattactctaattattattattataaaatataaatacattaagaatatattataaattcaagaaaagtaaacaagaaatgtactctactagagaaaatatcaattataaacatattatttacaatcgaatgtttatcaatggcttattcaaatttatgaaaaccaaacagaaatatggctggtgttacaaaactatcaaacttttacttcatcaagtacgtacatgctcacacatttttacagttgacagagaagagaaaatgaagatatctcatgtggttaattagctactaactcattctatacaatactattgtactcaattataaattacatatactatttattgacacaaggttacaacagattatcgaaattcaagtgaagttcaagacaatttattactaagccatatattagaggaaacacaaatattgattagagaaaattcattaattaagaacatttatcaacaagttattattaacacttattaacacttatttattaacaattaatttattaacaattaataacaattattaaaatgattgacatttaggaagaccatttatcaaaatttactaagatttattaagatttaaaaagattatttatcaagattattaattaaggtcatatattaagagtatttattaagatcgtttattacagaagttattaagatcatattaagttatttattacagaagatcgtaaaagaaaaatactattttaacgcatatattataagagctatttatcaaaatgagaaaggctgattcatttaaagctaatttattcaaagcaaatttattaaaaagattattaaagatactttatttaaagctaaattattaagggtaaaatccatattacattccatttattacctatcaagaaatgcacaatcaatattgaaagtctacagtaagactaaaagcaaggtaagaattacataattactgctattaccatttattttaaaatacttcaagaattattattaagaagtttgaaatatatatattagtcatcaacatttactatcactaatatttattattactaacatttattattactaacattattatcactaacatttacatttattaacatatatgattataaacatttaattaacatttactactagtaccaattttcaagatcacatgttacatatctaatatctaaaatatttatcaaaaaaaaaaaaaaaaaaaaatttacttaaatcatttatcaatataatttatcaagattatttaccgaaaccagttagtaaagtttgcagaaattcatttatcacagaagctcatacattacagaggctcatttatcataaaagcccattatttgcagtcaaagtatcacggttatcactcaccacttatctcatagtttttcatattttataatatcaacacggtgataagatttaaattttaactataagttgtagtaaaaagctgtattaaaaaaacgtaatatcgagtgtaaataaatagaaaagagaaatgaaataggtaatgtaaacgtaaatgtaaggtaaaataaagtaaagtagagaaataggtagaaaaaagtacagtagaattataggttaaagcattcactcagtgtaaccaatcaattctttagccagttcaagtaatctatggctgagttcactctgtaatccataatgtaaactcaaaatatcataattaacactttcgttgttaccattattacgttgtccaacgtataatcttaatccacataataaattctcaagaatgtaatggtcatttttatcaaggacatctccatgttgataagaaatgaatgtatcttgttcaaatttaagattttcggttatactatcaatatcagtgtcatcttctttatcggtatttccagaaattgaaatattatcaaaattatcattaaattcatcatcattagaactattatcagaatctaaaatatcagaatcgacaccttcttcaatttcatcttctaaatcattataattttcagtatcaatatcattattgttatcattttgattctcaatttccttttcatgttctaaaacaacaactaatgttctaaacgttgcaatcaatgccattaaagaaattgaatctgaacacataaattttcttgatttttcatttttcaaatatttgattaaactacgaccatattgataattattaatttcatactggtgtaaaataattgaacaaattaatgataatctattctcctctgaaatgatttctaatttttttttaataaaatatgaagaattttgaactgataataaaatcttcaaaacttttgataaaactggcgtcgaacttcttaataattcaataattcatcttccttcccattattggtttcagaatctgatttaatctttattaaattatcttcaacacttaataaaatcatcttcaaagtatcatccaagaatgagttattttttggatctaaaactgatttgaaaatcttacaacatttaatcaatttgatacattgaggtggtataaatgattcaattacttcaatatcattgatcaatttgagtgtatcatgttgaactattgaattaaatttagtattctcattaacaatatcacttaagaatttaaccattctagctctaatattctcaactgaccacaaaacaattgatagttcaaataaatttaatttatttgttggtgtattgatcaaatattcataaattgaattatatgcgtgattttgtaaattatttgcagatccatataattcaattgcagttttctcactagatttaggtttttgttaaagaaactaaaattttagaaatttggacattgaatatttgttgaatttatgaaatttggatcaaactttgataaaatctattatatggaaattgatgtaattaatattattattgtttttattaagcatttcagaagtatttgataagtttaataatgaacttaattaaaaagtcaattcttgaattgaaacctaaaatataaccaataattgggaatctacgcatgaaaagttccaaaaggataattttgttaaaagtatgttcaattggattagttaaatttgaacccacaataatattttgatttaatttccaacttgaaacatcagatacatttaagattctaacataagcaaataaaatacctgaaaatgaagttgggaaagaagttaaatcaaatggaaaaacatcagcagcttgattagttgcatttctgatttggtttgaacttgaatttaaattatgagtttgaggggataaaaaatttagtattgaagcaatagcggataactggaaagtttttgtatttttatttgtttccgaatttgttttatcaccttttctatcaaagaaatttgggaatgataagttgaagaagtaataaatacaagagaaaaaagtagcatattgaataaatatatttaatttttgtaataataatattggaattgcatttaatgaagaataattttcattagtattactgaaagaatttgataaatttgaacctattaaagctgccacaccaccaaccagtaattttgaaggtaggttgttattgttgttgttaatattattgttattattgttagcatatgggtatgaggtgaattgtcggtgatactcatgattgttatttatatcatgattgttcatattattcagattgttgttcatattacttatattatcattcgtagtattattattattattattattattataaccattattattattttgagtagcattataattattggtattttgagaacttgatctcgaaggaggattagttgaagctgaaataatggaagaattatttaagaaaggttgcattgttgttctataaccataactacttctactattattatctaaatcatttggaacagaatgatagactggaggttgtggacattataattattagttaggatcataatatgaaggattgttaagggtatcattgtaattgttggaatagttggtattataatcagtataattattgctttgattataggttgttgagttattattattattattattagtaatattattgaatatcataattattattataattaatagaatgattattatttggcataataatttgagacatttgaggttgatttggtaaattacttataacttcaattggtaaattatgtaaatcactttgaggtttataaacataatttggatttgattttaaaattctaatttcatttaataataaatcattctttgattttaaatgtttaatatattctgttgcctttgataaaattgaagctttatttaattttgatgcaggtgttaaaccttctaattcatcaaaatttgttggactttcatcatctaaaattctaagggttggtacgacatttttcaattcaataaattttgagttaatatttgatctatattttttctcaacaatattatgagatctctttgggtgttgattgatagagatattattatctttaacattatctttactactactttctttatctttaatattaatattattatcttcattgttactatcattattattattaatttcaatcttttcctgtttattaaccggttgagaagatatgggagaagatttaagaggagaatcagaccctgaggatgaaggggatagtatctgactgctcattgttgttcatatagatgaagaagaaggtacatttaacaatgaaaaacggatgagccaggtataaatcaaaaaagggcaacaaaaaataaaataaataaaagagacaaaaccaccgtcccatcgaccgcactcttattaaataaaaactcactctctttttttcttcttccactttctctaatataagctatattactattattaaattgttaaattatcgttactttgccttcaatttggttttatcttcttttagatctttatattctcttttgatctttcacttctcttttagtacacacacccaactactatatatatcacactagcccatcatgtctatgaaaagaattaataaagaactccaggatattggtagagatcctccatctcaatgttctgcaggtccagttggtgatgatttatttcattggcaagcttcaattattggtccagctgattccccttatgcaggtggtgttttcttccttgcaattcatttcccaactgattaccctttcaagcctccaaagattcaatttgaaactaaaatttatcatccaaatattaattcaaatggtaatatatgtttagatattttaaaggaacaatggtcacctgctttaactatatcaaaagttttattatcaatttgttctcttttaactgatgctaatcctgatgatcctctagtacctgaaattgctcatatttataaaaatgatagagctaaatatgaagcaactgctaaagaatggactaaaaaatatgctatttaattttagtatcttatccaatatttagtatttttataaaaatattttataaataaatctaattaatattacttacttatcataatactctatactatacttcactatagtatactgtaatataccttcccaggtataatatcaaccatccctctaaataccgcgattacccataaataaccgttgattctatcttgacatgttttttttcttatacaaaccttttacaaattaaactttcattttccttttccgtcccatatctctctacacaatggagaaaccaccaaagaagaaaccagcatttagaagaaattatattgcttgtctaaactgtagaacaagaaaagtcaaatgtgatttaggtagtgttgaaaatcctcatgatccaccttgtgctagatgtagaagagaacgtaaagaatgtgtattcgttgatccaaaaaaattatcaaatcatctacttgctcataatcaaagaaaaactttactaaataataataacaatagtgtcaataatgttaataatatcaataataacaatactcctattcaaaataattcaacaaatactataaaaattaatccaatattaccactacctaatccttatttccattcaaagccaatcttattgaataataacaatactatcaacaataataataataacaatcctcaaaacattcaatccaattttcataaccctaatgaagagtatgattataatgatgatgattataatgatgattcaaattctttacattcatcatcaaaaactttaactagaatttcttcaaatcctttagatccttcatcaaatccttcaatgccatcagttaattcatcaattcaaagtttaactaataatgcaacaatgatttatttagctcatgttgcaggtaaagtatcacaaattgataataataaagaatcttttgttaaaaatttacatgctgaaagattatcaaaattagagaaatcaactcctataccgacattcttcttctttgtcaattagtaatactaatagtcaaaataacttcaaatacaaatttaaataataataataataatataaccagttcaaataatcaaacacctaattcagttgatgatactgaaccaatattagatagttttggtcatggtaattcacttaatccaatattaaataataatagatttacaatacctccattaacaacaactcaaagtatgagacaaaaaccttcaactaatttaactgatattgaatatataatatcatcaaatgcttcagatgaaattaaatctcaatatattttaactgatatagaagcaactaaattaattaaactatttttcattactttacatccattttatcccatatataccgaaagatttaagagatccaaatattttagctaattatccaatcttattatgcgcattattggcaatttcagcaaggtatcatccattacctgaaaaaattggtgattgggataataatgataatgatcaaaatgaaatagataacaataaaaatgataataataataataatgatgatgatgattcaaataataataaaaatttgaatgataggcatttatcagttcatgaacaattatggatttattgtcaaagattaatgagtatgactgtttggggtgaatcttcaagtagaagcgttggtactttattaacatttttactcttcactgaatggaatccaagagcaattcattttagatggggtgattatgcaaatagttcatatgatgattcattagctaataagaagattaaaataactaaaaatgttggtaaggataatactaataataataataacaataatagtaaaatcaacaattcaagaaaatcatcagagattaatcttggaaatgagtctcgtaacaatagtaataataataataatacaaacaccccacatcctcgtgaacatgatgaagaagaggaatttgttggattaagtgcaatgaagagaagtgaaattatgtcatttatgcttattggtacagcaactagattatcatttttattagatacagatccattaattttcattgcaactcatgtatcagaaattaatattgcagttggattaaataaaaaatcaatgttacaacaaacgttaagtgaagttgatgttaatgaaccattacttcaatttactttatatcaaaaggctaaaattgaattattacaatttttttcactttgttatgaaactttatatggtacaagaccaaaatttattagtttagataaatatcaaactttggcaattttagatattttatcaccaatattagaaaattggtataggaaatattttaaattattaaaaccttcaaatattcattgtgctcaattaactaattgtaatgatgatacaaatcctaattggcttcaattaattaataaaaatgtcaaactggaacgtgatttaacaattagtattgaaagagaatcattaattttagattattattatacaaaattatatctttattcattagcattatctggtgatacatcagttaatttgagtttaagaaattctaaaaagggtaaaaatttaagattagatgaattagctagatattcaagatatgttgaattagcttataaagctgccaaggaagttttagcagttattcaacgtgtaaggaaattaaaattattaaaatttatgcctgttagatgggttacaaaagttattaaaagtgtgtcatttattgttaaatgttatcttactttaacaacagatattaatctcaataatggtaataataatactaatccaaataatcctaattcaaatatgaatacaaatggtgaaattttaaaattaagtgttataccacttgaagaaattataactttattacagaaaactgcaatttgtcttagatatgcagcacctgatgaattacatttatgtacaagatattcaacaattttaatgtatctttgttcacaatttaaaactcaattacgtgaacataatgataaatttaagaatggtataagagaatatgagaaagatgttgaattaaattatcatgaaaacgaaaatgaaaacgaaaatgaggaaatggaaatggaaggaacttcaacacaacaacaacaacaatataatgaaaattttaatccaaatattataccgaataatacaatacctgttaatatttctatgaataacgaaacaattaaaaatcaattacatacggataatatatttgaaaacaaaaacttaccacaatttcaaatatttgatcaaaatccaatgacaccattaaatccaatatcagttaatgaaaattatccaccaccaaattcgaattttgttaataatgatgatattgaaaatattaattttagtaatgcaaatcaacaattatttgatgattttttcaataaaaatccaagtgaaaaattatttaattttttttcaactaatgataataatccaggtttagattttgttgatcaattcacaaaggaaattgaaaaagatttcttaagtaaaggtggtaaacattaattaatttattaatattctatttatctataaacaatttctaattgaaaacttttttaaataatttacgaacggtacctttacgacccagttttttcttaactgattcatgcttaattttaccatcaattgaatttgtgatttccttcatcttttttcaaaattggtgaatgtaatggtgatatattattttcattatcctttatagtaccaacactcttactactataaattgattttaattcaccaaatgattttttagtaggtgttttgataatattattataatttttattaaatggatcaattggtaaatcattagtagaatcttcaatatattcaatttcaccacttttaattgaattattaattgatgaattaccaattgatgaattattcattgatgaatcatttggattaatttcaattacattaattttagttgattcatcatttgatctttcctttgataagtttgaatttgaattaaagtgagaatttgaaattgaactaatatttgaacctaaattacttttcttaaaatcatcataccaataataatcatctaatacatcattaaattcacctatatttcttgatttacttttacttaaatttagtccagctaaacttaaatgcattacatgttttgttattgattccttatcaaatgatgataagattcttcagtttaacttgtaatgtttgttcagaattaccacttataccactaattatactttgtttcctattccaatataaatctttaccaccaattggtgtttgatatccatcatgtttaatctcaacaatttcataaaataataatatatggagtttccttttccataacttcattaaatgtataagtttttgccttatccttagccaatttccatatcattgaaaattatccattcgttattattactattatttgtaattgatgaagaatattgtcttttacgtacaatactaacataatgaccagagtttgttgaattacctctatgacatacacaactttgtaaaactaacataaatgaacctcttggtgctttatgatcaaatgatctcttaaaatcaacaaatccgggtttcgtcctatcctctgcaataaaatatggatatttgataatttcaggtatagttactttccgattgattttaattggttgtccacgttcattccaaatataccttttcaaacaaattggtataactggacgtttattattaaatctttgattgaaatatgaattattcggtatttcgatttatactttcatcatttttgggagtggtgttagtattggtattagtattagcttgaattgaatcaattgtctttgatcttgaagtacgtcgacgataaaattcttcatgattttcaacagttaatttaatgtcaggatctgtataataaggtaataattgtaaatacatccaagcaggtaatgaaacttcagtatttgaaattgatgatgatcttctagttaatctagttggattaattaattgaacattatttaaaacacttgctaatgttgatgatctagttctttgtctctctaatttttgattaactgtcctaaatgaaccaatacgatttaatgaatcaaatggtgttggggttggtgttgatgttggtgttgaattagaatttgaagttgaaatatttggattagttatatttggagaaaaatttattatagaattagtagttgtttcaattggtggagtatttgtatttgatctatacggtatatttttaaatgaatcagaacctgaatgatggagttatcattgaaggaattaaaaattgcagatgatgattgttgaggagttattggaattgtatcagttgttgtattaattgattctaatgatttaagtttatttgtagtgttatatgttaaaatacctaatttttcatattgattgatttcatcttcattattgctagtagtactatttaaatcttcttcattattgttactaatagaaagagctgataatggtgaaggtgatgatgataataataatgatgaatcctctaatggaatttctgaagattcatttgatgaaatgggtggaggtatatttgaaggataaatttgaatcattcaaaggatttaaatgagataatgtcattctttgatcgatatgtcttctaactgttattgaattattaaaataagtatttaaacattcctctaaagtaacaggtaaatccaatgaagaagaagaagttggaattgaaattaataaacatctttcatcaattaatcttaaatcatcactaacatttaattttccattatgaattatatctaatttcaaagttaataaaggtaatgataaagattctgctaaaaattcaaaagcttgtaaagaatcttgttgtttaccacttaaaaccatatcacaaccaagagaatttaaaactaataataattgatacattatattagtattaatatgttcaccagatcttaataaattaacaataaatctcataattattttcaatttattaatttcaagttgaaaatcatctgataaatttggatcaattgaattatccaagaggaaatcaaatgaagaatttgaataaaataatgaaacaattaaactatctaaataacaagttgtatttttataattatccattccaattaattgaattgatttagaattatttttatattcacctttacaagtaattaatttaccatcaattgataatttaaataatctaaaatatttataaactaataaaatatttgaattattattcgaatctaaatttaataaaataatgaaaactgaaattaatctttgattttcaatatcatttgaaactgatttacctaaattaatttgaattaattgaataatttgtttatgtaaatttttacgatcatttgataatttaatatttgattttgttgaattatcatcaaataagaaaactccaggataatcactcggcagtttcatgatttaagagagtgttatggtattgtctatagatagtagtatgaagaataagatagataaaagaaggttcaaagaaggttaaaataaggagatcaaattgatcataataataattaatattatgcaggcaggcattgcatgtggagaaatcacccaacggataaaaattgcatgctcagagaagggtccaatttcttatcaacaaagtttgatttattgaatttattaggatcattatcattgttggtatataaagaataatatataaaagtctataaaggtggagtgtacatgtatgtattttgatgttgtggcttatgagttgaattcattgtataaccatttaaagagatctaaattacaccaattaatttgatttcttaaaattgatttaatatcagaaatatcagaagtttcattattattcattatcattattatcattaaataaaacaaaataagcaaaccaagatgcaaataatgaataaatacttttcttacttttacaagttaaatttgattttaagatattaatcaatctaattttatgccaattaattaaatcattataattattattattatttaaatcttgtgacattgcaaatgcaataattgatgaataatcatttgaattttggaaaattaaacttatattaattggttttttcaataataaataataacatgatgaatgataaataattgaattaaataaatctttatcaattgcgaaaataattgaattatttgattgaataaattcttcattacctgataattttcaatctccaatcaagtaataaattccaaatatcaacccattgtttaatatcatcattaattaagaaaatttgtaatgcaatattagaaatttgattagaatttggatgaaattgataatgaattattacaaattgtttgtaaaatttctatatcattgatattatcattgataccatcattggaattttcattattaacattatcgacagtttcatcattaagttcatcattattttcattactattttcattactattttcattactatttttatcattatttttattaattgttcttaaattacaacaaaatggtattgttataagatttaagaaagttttataattttcaatatcattattaaagatattaattgaattaataaaatttaataaatttttcaatcttgaccaaatttgtgatggatcaatagataagatttcgaaatatgataataagataattgtccaccaaattgattcatttataatatttacatcagtgtattattattattattattatttgataaaaataattgaatatcatttcttaaaaatttagataattcacgtacacttaagatataaaaatcaattgaattttcacctaaataattaatatcaaatttttgtaaaatttttgaagaaattgctaaaattgcaaaagttaaagattttgaatctcttgagagtgaaagtaaatgatttggattttttaaatgtaataaataagttggatcagttaagaaataatttgataataaattagttaaagattgagtaaatgaagaattaattgaagttaaagatttatcattgaaaaatatgaatgaattaatatttgaattaaaattattaatattttgaagtgaaggtataattgataaaattgaagggaaattaattggtaatgaaatgaaatttgttttaattgtgggagatatattattaatattattaatatttaaagtattaagatcttttagtgataaaattttatttaaagtttcatttaattgagaaggttttgacataccattttgaggccaaatacaatttaaatttttcgattgacaaaatttacaaattggttttgtttcatcacattttttatgtttactacgacaagtcaaacaacccgttctaactcttctcttttcaggtggtgttgaaatagtggttgtattattattaatatttttcaaagattttgaatttttcatggagggtttcctacctctctttaaaggtagtctatttgaagatattagggaaatagaatccggagataaatctgaaactgatgacattgttatccatatagaaatgaatgaaaatataagaaaaacccaactaaagatgtatcataagatcaataaccattaatataaaataaaatcggttaaaagtggataaaattaaattaaaataccgatactaataatagtgaagagcccagtaaataaatttaaatttattattcactaaattcttatcttttaacaccgcggggatttttttttttcattttagtcacgtgattggtattacgtaatgatattttatttatgaaacaattctattacagcatgaattattgattaaagaagtagtagtagtagtagtagtagaagtagaagtaggagtagatcaatttattaatctttctttttataactatcttataccccccaaatatcctacatataccctttaatcacaatgtcttggtcaggttttaaaaaagctgttaatagagctggtaatcatgtaattatgaaaactactaaaaattcaattttaaatagtgataataataataatttaattgataatgaatttcaattaattgaacaattatttaatcattttgaatctttaataattgaacttaattcagaattatctaattttaaaactattttcaatgatttaattttaactcaattcttaatatttaaatcaattaattctttctatggtgaggatgaagaagataataaaattaactcttttaataataaattattagaaaatttgaaaattattgaaaatgatttattacctcaattaattgaaccatttaatttaactattttccaaccaattgaagatttaaataattataataaagaaattcataaattaattaaaaagagaggtaggaaaaaattcgattatgaagtttcaaatacaaaattattaaaattacaaaatgattataattctttacaatataatcttagagagaataatgaaagtactaatgataataatcaattagataaattaaatgataaattaaataaattaacaattgaaaataatcaaattactaatattttcattgaattaaatcaaagattaaaatttgaaattgatgaatttattgctttaagattttcattacttgatccttcatttgaaagttttattaaaattcaattaaaattattttcagatatatctaaaaatttaaataataatttaaattcattaattgattcaaattcaattgaagattatcaattaaataaaattgatgatagattagatgaaattttaattaaaatgaaatcacttgatattgtaaatatataatatattatatacatcttatacatcttcagaaaatataaattctttaaattctttatatgctttatttaaatcatcattaataataattttatcatgagcaccagttttagcatattccatttcagcagttgcagctgcaattctcttatttaatgaatcttcagtttctgtacctctaccttgtaatctttttcttaattcttcaattgatggtggtgataaaaataaatatcttgcattaagatcagtttttttaactgatttaacaccttgcatatcaatatctaaaatacatgttctctttaaaacatctgaaacatgtttaacagctgcaattgatgtaccataataattacctgaaaattgtgcccattcaataaattctttattatcaatcattttttgaaattgtttaacagttgaaaaataataatcaattccatccttttcaccatttcttggatttctagttgtattagaaactgaaaatccaaatttatcaggatattctgacattaatttctttaaaagtgtacttttaccagtacctgaaggaccagagacaacaataggacgacctgccattataattagtggttatcgatggtaaaccaggaataaaagataaagataaacacctagtcaatagtaaacaaacagtgaaaaattgaataaaaattatcaacatttgaaaaataagtaataaacacttagaaaataaagacgcgcagtctcatttctttatcacaggacatgaatctaatgcttgattttaacaaacaacatgtcttccttttctatggaacaacaatgaactcaattataacttctatattgcttcaactgtctgtagtgttggctaaaaatattatctcaggtggtaatggtagtagtggtagtggtggtagtggtaataataacttgaatccaattgatgaaccaatagatgattcacctgatattaatttacctgatgataataatttagaagatataagtccaattgctgatgaaatattctcatcttgggctttattcattgttttattcttactttgttcagctttatggtcttcctattatttacaacaaaagagaattaaggcaattcatgaaactgttttatctattttttatggtatggttataggtttaattattagaatttctcctggtcattatattcaagatgcagttaaattcaattcaagttattttttcaatattttgttacctccaattatcttaaattcaggttatgaattaaatcaagctaatttttttaggaatattggtacaattttaacatttgcaattcctggaacttttataagttcaattgttgttggtattatattatttatttatactaaattaggtatagaatcaattcatatatcatttgttgatgctttggcagttggtgcaactttaagtgcaactgatcctgttacaattttatcaatttttaattcttataaagttgatccaaaattatatacaattatctttggtgaatcattattaaatgatgcaatttgtattgttatgtttgaaacttgtcaaaaatttcatggtaaaaatgtggaaattagttcattttttgaaggtgtctcacttttcttattaacttttacaatttcaactataattggtttaattattggtatattaattgcacttgttttaaaacattcaaatatacgtagatatccacaaattgaaacttgtttagttttattatttgcttatgaatcatattttttctcaaatggttgtcatatgtcaggtattgtttcattattattttgtggtattacaatgaaacattatgcttattataatatgtcacgtagaactcaaattgcaacaaaatatatttttcaattattagctcaattatcagaaaattttattttcatttatttaggtttatcattatttacagaagttgaattagttttcaaacctttattaattataattacatttatttgtatttgtattgcaagatgggcagcaattttcccattatcaagatttattaattggttttcaagatataaaagacaaaataatttaaataattcaatttcaattattcaagatgaaattccttataattatcaaatgatgcaattttgggcaggtttacgtggtgctgttggtgttgcattagcaatgggtttacaaggtgaatctaaatcagcattattagcaactgttttaattgttgttgttttaactgttattttatttggtggtacaactgctggtatgttagaaatgcttaatattaaaactggttgtattgatgataatacaagtgatgatgaatttgatattgaaattccaaaaataaataaaaatagaaatactattaataatgccactaatggaaataataaatattttgatgttgaaacatcatcaaataataatagtattaatggtagtacaaataatttaattgatgataatattgaattaactactaatgatggtactaatttaggaattgatgatcatagtaaatggtttacaaattttgatgaaaatgttttaaaacctgtattattagattctttacaagaataatcgattataaaattaagttaaaatattaaataaatatacataaaatttactctttatttattattaagataaaatattagttgttaatttttgttccttttgttgttctaatgccatatctgtacaccattttgctaatttgaaaacttcaggtggtaataataaatcatttaataaattattataatttataacaattttgaaaaaataacttaatgataaatcatttataattttaattgatgtattttcaagtatatcttcatcaattttatttacctttatttgataatttaaaaattcacttgtacctttataaacttttgttaaaattgttaaacaatctggtaatgtattaattattgaattactcttatcttcaattttagcattaattaatatttcacttaatgcaataattgaaaatccaacaatttccttattaggaattctcttatttgattgtgtttcaacattaccataaacaaaactattaactatttgtaaaatatcagttgaaagaattgataattgtgatttaatatcatttgaaagtatatctttcttactattggtattactaacattattattaacgttaatgtttaatttcttttcaattaaatccttaaactgtattatactactaccatctaatgttgataaatcacttttggaagatttagcagtatttgttaaaattaaaaaaaattcacttaataatagagtccaattatcagctctataaaaaatttgtctatcaaggaaattatttgaagttgataaataagcaatttcttgaaatgcagttaatctaataagtggatttttaaaatctttcatacctgataataaagttgaaattggagttttggaataattagtaatttgtttatcaatatttaaacaaccaattaatgcataagcattaaataattcatttaataatattaatgacaaataagttaaccaaaaataaaaagatattgtaaataatgttgaataattaatatctgatcttggtaattgattatttaaacctgttatgaaaactaaaggttttaagaaaatatggaaaaagtaatctctaaatattaaacgatataataatggaattgtaaatgaatatattaaatttttcaatattgaagtaataaatatttttataaatggttgatttttcaaataatcaaatggttcttgtctgaaaactccaattttaacacgtaaaatattatattcagagaataagaaatctaatgtgaaaatgattgatgatattgaagttgtaaaacataaatataagaaattatcattaataaaaggtttaattgtcattgttggagtttgaatataatagtttaatgaatttaattgacaaaataaaataattgcagttattgaatagttaattaaaaatgatgtaaataaaatataagtatttttattatttaacaatgaaattgatctgaaaactatatttggagatatatttgaatctgttgttgttgtgaaagagcgtgcttgttgtattatgaaatatcccaaccatagaagcattaattttaaaggatatgaatataattttgaattaaatggtaaagatattgaaaatgtgaatataatagctattataaccgataatcggtaataaaatgtcattcttttgtgaaacactctattgtagagtgatttataggatactaccattgttatatcaactgtccagtgtctatattcaaagaaataagcacaatcaaagacaaatataaaaaagacaaacaatttcaaaatgaaaatcatgaaacccaatgtcaaaaaaaaagcaaataaaacaattacgtaatacgattatacaatatagtgaagggcgatttgattttaatgttttttcaagaccactgacacgttaagtcatgattttcatttgtggacaatcaatgtacaagagttccaagggagaccatagagcacacacgatatctggcggtgattacagtagagatgaggtcactaatattcaggagaagttaagtagacaattagggcccgaatttattagtaaacgtaaaggaccaggattttcaagtgttcaatatttagaaggttggaaagcaattaatttagcaaatgaaatatttggatttgatggttggagtactgaagttaaagaatttaaagttgattatatagatgaaagacaaggaattgtaagtattggattaagttgtacagttcgtgtaattgttaaaagtggtgcatttagagaagatgttggttatggttcaattgataattgtaaaaataaggcaatggcatttgataaatgtaaaaaggaagctgtaactgatggtatgaaaagagctttaagacaatttggtaatgctttaggtaattgtttatatgataaagatttcctccaacacgtgactagagtggctgctgagccgcgtgccttcgacgcctcattacttatgaggaataatacaaaggataatgaagataataagcaatcaactaatggtaacagtattatcaataataataataataataataacaatattaaagtacaacagtcaagagtattgcaacaaaatgaacaaataaagaatgtgggaaaagaaagggtcaaagaaatagaaagaagtgtgaatgttgaaaatgatgttgaatttaataatgatgacgataatgataatgattcattcctgtttagtgatgactggccagaagataatgagaataataatactgttaataataataatagtaataatattaaaaataataataatattaataataatggatatgccaataaaactaacaataatgagaaaatagataatttaccaccatcaccacaacaagttaaagtacctgatcaagtggtttttgtacaagccagtgccgcatcatctattcaaaaagatccattactgcagagtaaaatgacatatacactgaaaccattatcattatcatcatcaacaactccaactaattgatcaaagtaaatctgttccaattaagaaacctgttaatcttgctgttgcaccatcaagagatccactcactaagagagcttttggtgtaccacctaatatgcttaccagtaaaagattgagaaaatagtactactgatactgataaagggtaataatataaaaaaaaaattgtccatcgcgaactactccccggagataaaatgtattttttggctcattggaccctggtttcttgctgatgatttgctactatatatttgctaccatatcgtcattaacatatatttaccttggattacagtttagacaacagtggagtatctaactcctaagagatactcatcatatgtcttgctctgatttaatgttttgttatccttatcattctcaatattattatgactaaatgggataccagatgaaagagtgtgcaatcacttttttttttgcttaataagttataatttactatatatcttttaccaccatatacatcactaattattatatatcctatgttaatcaaattaactctgtaatccaattacatcaacagaacgtatataaacgatgtaataaacacttgaacaccgatttcataccgagttcaatatactccatttcaattctaaccaattaaaatattatccaccatattatatacattactacttttaccaactagagactgagaatataagctgaacagtaattctaaagtgtgaaaaaacactatgaaaacacaatttttcccagggtccacgcaacgatcgtgtgacacgatatctccgttcaattgtatttccgtttaaaactgtttttcttactggtttttcctgtttttctctataaggtatttcttcataacctatttcggagttatcgttggtgtatacagtcagtacctgaaccattttttctgctttgctgaggagaaatacttccgaattacatttaacttgtcttttacctattattctgttatccaaccatatcaatttacaaaaaatttagattttatcgtattgtgattgaacccttaagggtccatttatttataaattaattatcagaaatcataaaatttatacaaatttttttttatcttattccaatcattgctgtttaaaaaactattgttttaattatttattgtcccttggtaaaccttttaaatatctaatggaatccctcatctaacctgtcttttaaataaattaactctttaattatctttaaataatttatactcttttttagtttcttcaaacaagcaattcatattaacttaatagattaatgaagttaacaactttccttcaatttattttctttgcaattgcagttaatgccggtccttggacaagatattcacatgaatattatgcatcaaataattgtaaattagcagttgacggtgttgctaatttttgtggtgctgctgaagctgctaaaaaatatgcatgtatttgtaaaaataagaatgcacttgtttcatggcttaattgtggttttgaatatttccctaatatttctcaagaaagttatgttcaaagtgttattgatcaatgtcttgcaaattcaaaagcaaactcaactacaatgaatgaagaatacttaatgaaattatatgatgataacaaatcaaaaattgttgatgttaaaaatttcacttctccagatttccctaaaaataatactgcattcccaatttcaggtaaaaaaatctctaaaactgctattcttggttatcaatcaagtagaaatagatggggtaatgtttcagcttctcattatcttggtattggtttccttgcagcgtgtggtgcaattggtttaattgctggtttaattaattggtcaatcagatttagattaattgattcattaccaaaaattttaaagaaaaatgttacattagcattatttggtaaaaatcatctacattctaattcaaatatccttggtgttaaccctgatagacttgaaactatattaattggtgcaatgttgttattttcaattttagctaattttattcttggttataattatatggaaggtgacacaattttcgcaaaaaagcaaactggactttcaagatattatgctgatagatctggtattctttgttcatatcaattaccattgttatttttattccctggtagaaacaattttttccaatatattacaagatggaaacaagctagatttattacattccataaatggttagctagagttgttgttgcagaagttcttattcattcatttgcatttgctgcacaaactacttcattaccaaagttttcccatcgtattaatgaaccttattatagagaaggtatagcagcaacagtttttggttttgtaattttacttttatcagttggtggtttcagaaaattttactatgaattattcttatttattcatattgttttcgttgcttgctttttatggttatcatatttacatacacttgatcaaaattatcaacaattttattgggcatgttgtggtgtttggatttttgatagatttattagaatcttaagaattttatcatttggtgttaaaaaagttgaagttgaatatttccaggtgaagaaattattaaattatcagttccaaaatcatcattacaaaaacctcatccaggttctcatgcatttattcatttcttaacaccaactaaatttttgcaatcacatccatttactgcatacccatcaccaacagattctaatatttttcattttaattgtcgtgttaagaaaggtatcacaagatatattgcagataaatgtaaatcatcaggtaaaaataagatttcaatgaaaattttaatcgatggtttctatggtgaacaatcaccatatcaaaactatgataaaacagttttaattactggtggtacaggtttatcaggtccatattatcatgcaaagaatttatctgtaattgattctaatagagaagttaaattatactggtcaattaaatcatatcaaggtgttaaaagttatttaaatgaaattttatcatttaaggatacaattgttaaaccaattatttatatatctaaacctgaaataaatagtactacaacatcgagtgatgataatgaaaagagagattctaattcacaattagattcacaattaattaatggtgatgaattagatgatgaaaaagttaataaattattatcatcatttgcagagattagacatggtcgtatggtagcatcagaaattgttcaaaatgagattaatgaatcaaagggatcaattgcatttggtgcatgtgcacatacagaagttgttgatgaaattagaacaacagttgcaaattgtttatcatcaacaactaatagagttgattattacgaagagatgcaattatggtgattgtatcattacttatacttagttatttacaatttacaacttagaatttatattacattatttaattttttttttcctgaacttgctattttatgtatagatgtagatttaattgtactataatttcaaacaaaaacattagaatctcgtaaaaggttttactatgttacattattatttctaaattcaaccaaattgattaatcctacttttaaaaactctaaaaagactgacttatcaaataagattataatacaagaattacttttatgctcttcaacgcttgctctccaatgaatcaaaaaaaaagatgatgatgaatattaatgtgggattaaggtacaattaaggggataaactggacttagataagcaagggtgtgacagttacagaaagcatcaagacagttaactcccaaactaatgcagtaatagacgatatgtccgataacttcaggtgtagattgtagatgataccaattaaagtgtgaaaattgtgagaagattaaaatttaaaatacctcgtgtgacgttaagggaaataacggacttatcggtggaccctttgcactttctcatgggaataacactttaaatttgtttgttgaatatattgaatatatgagtaaaatcttatttaataggatggtttcgttcattttggaccctgaattttgttaacttgtcttatgtgggtacttttatttaagtatttgcaacttattctaaagcgtttaaagtgctagaaatcattatatgtgcttagaataagtcaatatttagtaaatacaccatgttaaacaaaatactaatattaaaacaagtagccaatttatatcaaatcaaacactgttattattaacaatttatgcggcggtaaatggaataaaaggcggaatttttgtaaattttaatttacaaatatatttcctttttcaaactgattgattgtatgaaaattcgaactggccatacacaaggttataaattttaattacttgatataacatttctattgtatttgattgtataaatttatttactataaatccagtactgattccttactatttaattaatgggtttacaagattttcagaaatatgattcatttgtagtttttaaaatagtattttagtttatctaatataattaaagacaaactacaaccctacaatgaagttattaacattacttcaattcttattattatcattaacagttcatgctggtaaatgggaatcttattctcatgcatactatgcaactattggttgtaaattagctgttgataaagttgctaatttttgtggtgttgctgaagctgctgcaaaatatgcttgtatttgtaaaaatgaaaatgctcttgtatcttggattaattgtggtttagaatatttcccagaaattaatgagaagaatatttattcaaatattgttgatcaatgtctaacaaattcaaaagtaaactcaactaaaatgaatgaaaagtatttaactaatttatactaatgaaaataaatcaagtattgttaatgttaaaaactttacttcacatgattttaagaaaaacaatactgatttcccaattgctggtcatgcattatcaaaaattgctcatgttgattatcatggttatagatctagatggggtaatgtttcaacttctcattatcttggtattagttttgttgcagcatgtggtgcaattgctttaattgcaggtttaattaattggtcaattagattaagattaattaattcattaccaaaagttattaagaaatattttactcttggtttattaggtaaaaatcatcttcatactaatacaaattctttaggttttaatcctgatagattagaaactttcttcattatttgtatgttcctatatacaattttatcaatgttcattattggttatagttatcctaaaggtgatccaatttttgcaagaaaaaaaaccggtgtatcaagatattatgcatgatagatctgatcatttagcttgttatatcaattaccattattatttttattccctggtagaaacaattttttccaatatattacaagatggaaacaagctagatttgttactttccataaatggttagcaagaattattttcttagaaatccttgttcattctttctgtatggctgctcaaactgcttcattaccaaaatttgctcatcgtattaaaacaggttatttcagagaaggtattagtgcagttgttttcttctttgtcatacttttagcttcgggtcgtcttattagaaaatattcttatgaattattcttccttactcatattattttagttccaaatttcttatggcttgcttggtaccatgcacatagtcaagattatcaacaatttttttatgcatgttgtggtgtttggatctttgatagagttgttagaattattagaattacatcattcggtattaaaaaagttgaaattgatttctatggtggtgaagaaattcttaaattaactgtaccaaaatctgcattacaaaattgttatccaggtgctcatgcttatattcatttcttaacaccaactagattttggcaatcgcatccgtttactgtttacccatctgcaactgatgataatgttttccatttaaattgtcgtgttaaaaggggtattactcaattccttgccaaaaaatgtaaagaaacaccgaatggtaaaatttcaatgaatattttaattgatggtttctatggtgaacaatctccatatcaaaattatgataaaactgtcttaattactggtggtacaggtatttcaggcccttattatcatgcaaagaatttaattgcaaataattcaacaaaggaagttaaattatattggtcaattagaactttgcaaagtgttgaaagttatttaccagaaattttatcatttaaggatacatcaattaaaccaattatttatgtttcaaacccgggttcatcattaacaacttcaagtgatgatggtgaaaagaaagatggtgattcaattactgatgataaagaacctgatcatgataatctaaatgatgaagaaattttaaaattattatcatttgcagaaattaaacttggtcgtatgtcagcttcagaaattgttactgaagaaattaataattctcaaggttcagttgcatttggtgcttgttctcatacacaggttgttgatgaagttagacgtactgttgctggtgtggttacttccacttctaatagagtggactattatgaagaaatgcaattatggtaatcaaataatttttcattgatttcattatagttaattttacttcacccttttgatttttcaagacaaatttcactttttatcattttattctattcattatttccgtttcataaacaataatatatatacctaattatatccctctaattttaaactaatcgttgtttaaagtaatcaattttataaagaacaattaacgtacggtcattgcaaatttaatctcagatatttcggatcttccctcactttagtccgattattttaaattcccagtaaatctgacggtaataattttattttctattaaatttatgggctatttttacagcactaaattagtttcttttatttgaaacttacttttttgatgttcttagtgaaatactgtttgaatgagtcaaaaaactagcatttttgttttttttgcataaatttcactttttccattgtatgatttttatttattaaatgttatagcaagatttttaaattttttttgacaaaatcaagtttaaatttaatactataattttaaaaattaaacactactcgtccaggctcttagcagcttaactacagctgatcggctggaaaacggtgctttctgctagatattgcttaaggtcacgtgaaaaagtgattacgggttgcaccacaaattaatttttgtaacaagagctcttatggccaagttggtaaggcgctacactagtaatgtagcgatcctcagttcgactctgagtgagagcagttgtttaattttttgtttaacgtttttttgtttttgtttttggtaaaattctataaaatcatttggttaatcaaaaaattcgatactacatattttttagtgaactaataaaagtttttatcatttaatagtagtagattatacaagtgtaaataaataatagtaatatagataatttttttttggaattttgaatttttttaaagtgacttgggaaaatgaataacaataacaataataacaataataaaggaatgtatgtataatctactggaacttatattaaaatagaaatactatatttaaattttaataccagaagaaacttctaattgttcaataacaggatttaaaacgtttggatttaaatctttatttgttaattgtaaaaattcttcagtccataaattttctaaaggactttgagaaactgaaccaacaccacaatgaccaccaatattttcccaatcattaactctctttaaatttaattcattccacagttgatcaacagattcaattaattgatcacaaacttctttatcatgatgtggagaaggagtaattcttaatctttcttcaccagttgaaacagttgggaaattaattgcttgaacataaattttatatttatttaataaagcatcagaagctttctttgcatcagctgcattaccaaccaataaaggaacaatatgtgaaggatttggaattaactgggataccaatttctttaaattgctgtttaacatatttaacatttttttgttgattaactctatcttcaatattttttctaacaattctaatcgaagttgataaaccggacataacagcaggtggtaaagaagttgtaaagataaaacctggagcaaatgatctaatccaatcaattaaatttttatcagctgcaagataaccaccgacaacaccaaatgatttacctaaagtaccagtaatcatatcaactctatccataacagttttataatttggagatgaaatacctgaatttaaatgagctttaaaatctaaatgttctgcaacaccagcaccatgtggaccatacataccaacagcgtgaacttcatctaagaaagttaaagcaccatatttttcagctaaatcacacattttttcaattggagcaactgaaccacacattcgaataaactgattcaaatgcaataatttttggagttgattttggatacattgctaattgagattctaaatgatttaaatcattatgtttaaagatatgctttttagctcttgaatttttaataccttgaatcattgaagcatgatttaattcatcagagaaaataactaaatctttaaattgtttaccgaaaagagataaaattgcatcatttgcaacgaaacaagaagagaaaaccaatgcaccttcctttttatgtaaagcagcaatttcactttctaaattaattgcatgtctattatgaccagcgatatttctagtaccaccagcaccgacaccataagtttccattgttttaatcatttgattgaaaacttcttgatttttacccatacctaaataatcatttgaacaccaaaccattactttatcttcttcattttgtaaatgagcttttgggaattccttagctaatctattaatattattgaagaatctataagaattatcaattctctttttatttaattcattttcaaagaaaccattataatcagttgcaatttcatttgaagataaattaatgttattattagatttaacagttgcatcatgatttaatttagtaactttaatagaatcagttgcttgagcagatacaaattttgaagcttgagtataagatctctttgcttcaattgcaggacccataattggacacatagctgcttcattaactaatgaagaatttttagctaattttttcattgcagcagttgaatgtgatttaacaaaggggcaaacccttaaagaagctttagtaagtgattccattgttagttaacggttaactttggttagtaaagagtttaaaagaggtagtaagaagaagaaaaagagaaaagaagaaacaaaagaaaagaatagaaatagaaatagaaatagaaatgtactagaaggggtgttgaaaaacagggaaactgataattttttccattaagagagaaacggttaagtggacgtcaaaatttgaaaaattgaaaaatttgttagggatttgattacttttttaagtaatggttttgtattgtattgtatactatctactatctaatatctatatgatcagactatgtgtactatactgctactaccctgatacatacatatactaatactatactaatactatataactaactaatacacaatatgtaataaatcaaaccccgtaagtcatgacaataataattaaaatttaaggatcactcattggataaataataccattacgtaatatttgatatgatttattaatattaataataatttagaaggtctggaaatagatacctttcacttatctcatttcttcatttactgcacaattatgtcctctaatgacaatctagtactcaaatatgatactcagtatctatctctatcatatgacgaaaaattgtctcaaataaacttatctagatctctcccagaagattatgacaaccataaaataatttcaattaataataatttgatttcaaatttaaataatcatcaaatattcataattgattcctaaaatatctccaataaattcaaaatcttattctttatatgaatcagtacttaatcctatatttcaaattttaggtataaagttatacctatcttaagacaaattcatcaaattcaattaaagaatatgcagatttaataaataatgattccgaaaaatacttaattttatttatttctggtgatacaacaatatttgaatttatcaattatgtgtattccaattatcaaaataacttaaataatataccaaatttaacaattttaccattccctcatggaactggtaatgcattatcaatatcaatgaataatttaaatgatttaaattcaattgaaaaattatttaattggaatcaaaaacatttaccaatttatcaacttaattcaaataataacttaattccaataaatgattcattaaatactttacagaataaaaatatcttatttacagttgtggcttcttggtgtcttcattcaactttagtctatgaatctgataaacctgaattaagaaataattatggttctgaaagatttagaattgctgcaaataaaattttagctgaaaatccagtatttaagggtaaaattactctacaacctgataataaatcttttatctataatggaaataaatggtcattagacagcatcaactcaaattcttttacagatttatcatatttagttgttgctgctgttcctaattttgagaaaacttttaaaatatctccacattccaatattgagtctgatgaattacatctaatcacaataccactagtaccatcagataaaacaatctcattaatgaatgatgcatataataatggtatccatataaaaaatcctgtagtaggttatgaaaaaatttcaaagactaagactttagaaattgaaatagataattcaatgtcttcaaaattaagtatagtttgtttagatggtagttcatgggaagtcaccgggaatgacaggaaactatcaattactacatttgatcaatcatttttatactacttatcatagatagaatatatctatattataacaacttttctaaataaaatacatttttttaattcatattatataacatttaagtaaaaacacaatttaaatacaatttataagattgaaaatactttcattctttctttgctcttttatcagcatcttcctgttgaggaatatttcttttattagtatcattagatccattatttaatgatctattattattattattattagcattagcattagaattagcaaaattaaatccgttacctggtacaaaattcatattaggataaccaccactcatattgttgaaatttggaatatttggaataccattcatattattcatattttgaaattttgggaaattattgttcttattcatattattattcataatattacccatattacccatattacctattttattcatattattcatatttccaaatgctgacatattttgttgagtagttgggtttctatgattagttgacactggtccacttggagtctttttaccttcaccttcaagtttctttatttgttgctctaaccttgtaattttaccctgtaaaattttctccttgaactctttctccttttcaacagcagttctgatatccttctttaattgctctttctcctcttcaaattgtttgagcaacttagatttctcttcttcaaaactttcacctttattatcaccaactttagattctaattccttaatcttattttcatatattgcttcaagttcttcacgcttagctttggctctcttctcaactatctcattaatctttgcttgtgatggtgctctaattttaatcttatgagattcaatctcttttaacagttgaagatcactttctgcttttaatttcttcttgaattcttcaatatcttcaccatttacaggagttgatttagatttcagttcttcttcaagtttctttaatgcttcttccttctccttcacatacttagcttctaatgcttcaatatcaacatttgaactactattcttatctaactcttcaatcttcttctttaattcttcaatcatattcttagattcttgaacctttttctcattctccttatttatggattcaatcttgagattcttttgatgaacttcttcatttaattttctgatttgaagtctcaattcattttgagcatctgagttattggtattagcttgaatatcagaaagtctcttgatttcatcaagtgcttgctgtctttcagtacgtgctttcttaagtctttcattgaagtcacctctaagtttttcaattactgctgatttttcttcaactttagtggttaattccgtaatcttagcatcttttttagcaatatcctttaatgatccagtggcattttctaattcggtgtttaacttttcagcttgttgatttaactcaactaacttactttccttattacttaattgtttctttaattcttcaacttcactacctaaattattactattattagagaaattagcaatattagattctaattcattgattctattttcatataatttaatttgatctcttaaaactttattattctccttataaatacttaattcttgaatttcatctttcatgagagctaattcatttgaatatttatcaacagcatctgatttttccttcaatgataaaatttgaacctttaatccattgatttcagtttccttcattgtaatactctttctaagaatagattcttcaccttgaacatattgtaattgttgactcaaagaatccttttctctacttaagtaagaaactaaattcttcatatcatctgaattaccaaatgataatggagactcttcaatttggttgattaatgttctattttgagtttcgagttcagaaattctgattttatcatttctcaaatcttgttctaatttcacaatagtagatttattgttgtctttttcttcttctaacaatttatgtgattcatccaacttgtttttgatggattcaagttcatgtaaacgatcttcagattccgttttgataatattattcaaagtttctaaggtatcaatttgattagacttatcagataataatccattcatttcatcaagggatgcttctttagagtgaacatcagatttgataatttcaatcttagattcataatcattcttaatagagtcaaatgttgaaattgttaagttcaattctttaatttttgattcaaattcttgtttttcagctctagatgatgtttctaaattattgtaatcagattcaatcttttccttttcagtttctaaagtagttatggtttctttcaagttttcagcttcttcagtaatttttttgattttatcttcagaaatttgcttatattgagtataggtttcattcaatgaatttaactgttgttcagttacagcagctaattccttgtattgattggaatcttttgttgcaatatctaaatcctctaatgcatgttgtaattcttctttcaaaacaatcacatcatttgatccatcgttaccaccaattgaagttaacatagtttgttttctttcatctagtgccgagtgtctctttttcaaattcttgacttcttcacttaaatcttgaatgatcttttcctttgcagctaatgaatctttgatggaaatgtattcttcatttaataaatcaattctttgttgataaattcttgaatctgtattcttggagtgtaaaatattactaatttcagaattgctcttatcaagtttagctcttaatgtttcaacctcacgttgtaatgaatcaatattattggtatatctttgaatagtttctttaatactagcctgtctttcaacatcaatggtttgaagactaataatgattttgtttgattctgccttttcattatataatttattaacattatctcttaattgttgttcaacagatttccaaacttctttttcagcagttaaagttttgagtttgagttcggagctaatcatttcggatttagttttgactaatgaatcgtcagcaacttgtaaattagcttcaagtttagtgagattggtattagtcttttctaacattgattttaattgttcattttcatttttaacaaatgataaagttgattgaactgcacctactctttccttgtatagctcagtagtggattgttctttagataagtttaataatgcttcatttttttcagaaattgcattttgtaccttggtattgagttctgcaatttgagaattatatgattttttaacttcagaaagttcttcctttttagattttagttcctcaattaacaaatcgagtctttcattagttgcatcaatatctttcttttcacttaaagtagcaacaccggaatcaaataagttttgaagcatatccttagcattattagcagcttgtacttgagtttccaatgttttaacttgatcttgaagtttagttatagcttctttagctctttgaatggttgaactttcggcttcttcaattaaattaccagcagtattatctctattctccaaatcttcacccaattgacgtgaaataaccagtaatttttcgttttgtttaactaaatcaacaacattcttaaaagtagaaagtctatcagaaatcagtctattagtatcagtatcatcaatagtttgaattgcaccataagaagtaacaatattattgatagattgcttttcttcagaagttaatggatgatctccagatatcttaaattgcatttcagttaataacacacaaatttgtctttgaaggtcaatcttgtatctattcaagttacgaatctgtaattgaaattcttcgttctttttctttaaaataacgttggttttggatagattctttttatcattagttaaattttgtataacagcattaagcttttcttccttctttacaatatcttcatatttatcttgataagattgtagcagtggcaatttacgttcaagttcttcaagaacatgagataattcattttgtgctttaaccttcaaacgtttttctcttaatgtttcttttttagactcatttagattagtaattaggtctgttaatgttattttagaatcaatttcattcaatgttctttgtgcggataatggatcagctataccactattttcaaacacaacagattggttagatagctcattaatctctttttctaaattttcaattttgacatctctttcaatgatttggttttcaagatcctcgaatttcttttgatatgatttttcatcttcttcaacttttgcagttgtatttgcatataattcatcaagcgatgcaattctatggatattgtctttcaatgatttttcaagcacttgaatatgttcatcctttctagaaatttgagtcatgtattgtgattcttgagcagctaatttgtcagttaattccttaattttaaattgatattcattattttgagctgttgctttagaaagattagattgataggttgaaagtgaagtttgtgaaatatcatacttctgctttaccgcttcaagttctgatttatatttgtttaattttgacgagtattctaaattatttgaattgatttcttgaagtttattgttaagttctttttcataccaattacgagactctgttaataattgtacttctctttcaaatttgttgagttcaaacttatattttaaagattcagaaccactctcttcatttaagatttgtaagtcattaattttattcttgaggtctttgttttcatcaaccaatttttttaattctgtgttcagttcattgaattgaatttgtttgttttctaatagttcagatgcatttatcttttctttttgaagttctgaaattttcaatttcatttcatctataaccctggcattctttgatgatgaagaactaatactttttaatgtcgattcagcattcaagaaatcttgttcaattttggcttttgatttcactaactcatccatttcatgtttgatatttgatatctctgtttttgcagcttgcattctcttttgatgagaatgttgtaattgttcataattgatttctaatatttgtgtgttagatttgaatttttcaaaatcagtcattttgtataaaagagagacaaataaatccttatcattttttagcttatcaatcgaaatattgaagaatacagaaacagagtttaaatcatcattagcagatataaattcgtcatcaaactgaactggattctcaggttcttcaacaatatcttcgcttacaactggagctgtggtaggtggttcagtatccatatgatcttcatctacttgtatctcttgaggatctatgtccatttcaacttgttcaggagtaccattattctggtcatcttccatcaaaacatcagcttgaacatcaacttcctgtgcatcttgtttatcaagattgtctggaataacatcaatgacagaaacagttctatcttcttcagtgacaggttgagcgtttgaagtttccactgcagctaatgagactggatcagtattttcaggtttatttgatctttcttcaataattctttcaacaacattgttttctttgtcattaacatcttcaggaatagtagtttcttctttaggctcatgttggtcttcaattagttcttcctcaggttgatcttcagttaattgaacttcaggtgtatcttcaataacttcttccacaggttgatcttcaattagtttttcttcaggttgatcttcagtttgatcttcaattaattgaacttcaggtgtatcttcaataagttcttccgcaggttgatcttcaattaattgagcttcaggtttgtcttcaataagttcttccacaggttgaccttggattaactcaaccgccggttgatcctcagttacctcaccagtgacacttcctgttttttctaagtcactcttttctgtttcaacatcagctacagtttcaatttcattagatttaacattttgatcatttatttcaacatcgttattattagattgattctcaactggagttgaatccgaagcatccaatggagtttgactgtcatctttagacacagattcctcagatgtgcgatccattgataaaatttagtctaattacccaagattggccttgaaattcttttgctcaacaaaaatcagttttattcaaaccagtaatcttcaatattaatttatctcaatatcgcaaatttgaaaataccattttgttacctgtcacattttcttacttcacggtgtacgggcaaaacacacttttacccaattttcactactttatgggctgttttacatcttatttgttaaaatttttgtcagtaacaaatattacaataacatactcttacatatcaatttgaattgtgcttaaaaacaagcaaaaacagacaaatttcacctcttatcaataaacattccataaaggtcgcataagtaaaaattattttaacatgaaatttaaatcttctcaaaatgctacgccaaacacgtccaagtatctcaacctgtttataatataatagaaaataaagaatggcagaagagtttcctattcaaaaggaatataatggtaagtaaatatattttatttgtttcatgattttacccagattatactaacattttatttcaaaagaacttctgaaactaaaagataatttgttatctcaactacatgaaattgaaaaaagattagatatattgaaaccaagacttcacgatgagttagataacaaacatatagtaacttctgataaagaatttgatgatgctaatgttgatccacgttatgaaaattcaaaatataaatcttcaaatgtaaaatcagaaccatcaactccattaactgtaccaaaaccttcgataaatggattatacaagggatcacagatgaatgatttgaaactagctcagaagagaagagaagaaatgcaagctgccaaaattgaatcacaaataagagacagtaaggaacgtcataaatttctaaaatcaaaggatgattctgctatttcagtatcaagattaaatcaatcaatcaagaagactaaagaacatttaacaaaagttgacgaacgtgaaaaggagagattaagaaaacttgctgatgaacctgtacgttcatgctttgattatgttgaaggttactcaaactatcatagagatgtagtatcaaataaaattaatggcttagatgataattatgatccagttagagatcctgcatttgatatttattctagaatgtatgtttccaagttttattttccagaagatgtgataaaaagtcaaatgaaagatacacatgttttacgaatacctaacttatttagtaaacttccagcacatttagaagagttaagagaatcaaatttcatagtaacaggtgttgtgtcagctaaatctgaaccaattcttaatcccagaaaaacatcaaaatacatcagaatcagattatcaaattttaaagtggatatactgctgtatttgtatgatgatgcatataaaaaatattggaagataagtccaggctctataattgcacttttaaatccaaaaattgaagatataggttattatagcaataaaaatgttagtagttctgcagctaattatgttttaaaggtttctgaaagtacaacaattttagagtatgcaaaatttagagacattggttattgtcccggaaccaacaacaaaccatgtcaacaacttgtcaataaaaaggaatctgcattttgtcattaccatcaacaaaaacgtaccgataaaactgcatctcatagaaatgaaatgggaactaattatagactttttgatccagttgatgctcgtggaaataaacaagttatggttatgacagaaaaacaaattgaacaaagtgaacttgttattgataataataaaaataataaatcaacaggtttagcaattgaaaatgttgcaagaaatcttccattaagaggaaaagaaaatatcaatactgaattattgattactgatttttctaacccgactacattgaataatttgaaaacggaagaggagaaacaaagagttaatttcaccagtagtaaagctaatgcagctttctttaatgctgacaaagtcaataagtatgcattgattaaacaagaaaaggacaggaaattagataagaaattaatgtctaagaaattagaactggattcattagcattaaaagattttgaaaagaaacaaactgcaaatgaatataaaaaacgtcaaaaattacatggtaaagagacaatacaatcattaatggaagctagtaggactgaaaaatcattgcgaaaagatagagaaactgttgagaaacgtttaagagaaaataaagacatcgaagagcataatagactatacactatgaataaaagacgacaactcgttgatgcaatagacagctcaaagtatagtgaaactactaaacttgtaaaaaaattagaaactgaagttgaattgagtagtgatgatgacagtgacgaatttgaaaatttaggaagtatacgtaagtttctataacaataaacacagtaaacctttagagctatttgtcatgatttatacgagtaattataattttcattggtatttatataagaaaaagctataaaagaaaagttagaaaatcttctaaaagaatcaaacgataaactattttttcattggtatattaaattaactatttgtcagaacttgatgaacaaaattgtttcaaaattttccttaacaaaggtcttgagaaaggttttgataaaaatccagacatacctgcatcgatacaatctttttcattagaaacatcagcaaatgcagttaatgcaacaattggaccttgataacttaattcatttctaattatacgagtagccgataaaccatccattattggcatttgaacatccattaaaataagatcaaatggtcttgagccattattaatacattctttaacaaattcaactgcatctttaccatctcttgccataaatatatgattaataccttcaagtttaagcattcttttaacaacttcttgattaactgaattatcctctgcaactaaaagtttcagatctggatctatattatcatgaacaacagcaatatcggaagatgaagaatcagattttcttgatttatatgaatgtgcagtaccagtcgatgctcttgttattaattctggtttatcataatttttaggttcagtgaaaagtgtagatttagtactttgatttagatgttgtatatttataactatttgctagatccatcgttacatcattatgaataactgatgttgaaggatttttatcagatgacaaagtatcctcattttgttcatcaaatgtaactttcttctttttatttaatttttcattataaatatcttttgaatattcttctaattcatcattactcataattaattcaccaacttgaggtaaaggaattgtaaatgtaaatgttgaaccaacatcaacttcagaattaagcgttaaagtaccatgcatcattttagcaaattgtttacaaattgataaacctaaacctgtaccaccatgagatcttgataatgtttgatcaccttgaacgaatgcttcaaaaattttatcttgtaaagatttttcaatacctgtacctgtgtcactaacagaaaatctaataacccaatttttaaattcattattataattattatttttatcattttgattattctcttgtagatcctcaaaatcaatattatcagcaccaaaattataacattttcttgatttatgaacagattcaaacttagaattatttgaatcattagaaaatctatcttcattgaaatattccatatgacaatttggtgatttgtattgatcagataatgctttggcatataaagatgatcttaaagttgataaagttgaagtagttctatttgatattattgatgaattatcatcagaaccttccttttcattagttataccactatcagtactatcatcattaattgatttctcttcattaatttgtttaacagggtaatgatcagtatcatattgtgaacctttaatataaactttttcataattctcagcctttgaacgttcttcatcatattctcccaataattgaattaatacacgaactgtaccattttctggagtaaattttaatgaattactaactaaattcattacaacttgaattaatctatttgaatctccataaagaattatttttcttataaaatttggtttaattgaaataactaaatcaacttcttgatctttagcagttttagcaaaaattgaattaatttgtgaaacaatttcaataacttgaaaatttttcttttgtaattttgatttatctaattgatttttagagaatgttaataattgaattaaaatatgtaataataattcaccacttctgaagattaattctaatgaattttgaattttatcaatatcagtttcactcattgcaactgatgtcatacctaagataccattaagtggagttctcagttcatgagaaatatttgcaatgaaaaccgttttagcttcatttgccttttcagcttgttgtcttgccatatcagcttgaactttagcagcttctaattcttttgttcttgcacgaactctgtcttcaagatgagtatattgacgatcaagttctaatgtcattgcattaaaggcatcagttaattcagttaattcatcaataaataaacctttagtttgtaccagtgaaggtaaaggagtattttgataatccattgattcctgtgtattataactatttgaaaaactatcaactgatgaaggtgtattcaatgaaccattccaactatttctaacacttgaagagaatgattgtcctgttggagataaattaggtggggataaatattcttgatttttattatctttttcattaatgtcattattatgggtattattttcagcatttgaactattattattatgattataaattggtcttaagaaatttaataaatgagttgaatgtttcctccttctcttacgattcagtcctcttctattagttatttcttcagttgccttttgaagttttaaaataggtcgaacaccataatgagctaactgggattgttataaaacacataaaagcagctaaaccaatacataaaccaaccataattttaattaatttagtaataggaccttcaaattcaggttgaacttgttcaacagtaactaaccatagggcaaatcctaaatctatagatgaatagcctaacgaaactttttgacctgcagcatttttaatattaacataattacctaaatcttcatgtttttggaaaacatcttgagcaggtaaatatttagaaatgttgaaaacatcagtagttatgatatcaaaagattccaaataagaattttcaaaagcatgtctaaatcctgtataatttgtcaaattattatatgggtgaattggtaacaaataattaattgaggaatattctgcattttgagcagcagataatagtgaatcattaacagattggaaattaattatgacagttaaatatcctgaaagaaattgttgaggaactaaaatagattcatttgaataaactggtacagttaatgaaataaaataagcttcatcatccagtattggaccatctaaataagctccatttgataataaaccatcaggtaacgaaggaccagatgaagttgtattttgatcgaaaataaataaagaatctaaagttgattgagatgcattatgatttgaataaggatttgaagcatttgcaactaaaataaaattcagatcatataaatttgcatatgaaaaataatttgaagcttgaattgtttgttccattacagtttgagcatcacttaaagcagatggagaaacgttaccatgcctttcctcttagttaaagcttgttgaacagaaggtttaccacttaattgaagagcttggaaataataagtatccatagattgttgtaattgagaacttttcaattcagatacaacttcaagttttgaaactcttgtatcagttaaaactgaagtaaaataaacacctgtaacaatagctaagattaaaagagagaacattgcaacaaataggactaatcctataagttgcgttagtatggacactctaagtctatgtttagggaacatcatttaagtatatagacaggggtgtgtatatgatgatgacgatgatgatgatcgtatactataatattgtgtatgagtgtctgagattcgttatagcttatgcaaaagcctttgacagcaagttattgttatttagtaaaagatcaaacaaagtattggaaaatataataataatttaattataaaatttcatgcatacattaataataataacataagcggttagtactattatcaaaattaatgatccaaattaacatatccacaaattgaaaaaaaaaaaacatgtacgtaagctagttaattacctaattaatatgacgtatagcttatttgaaaaattgaaaaaattaaaaaaaaattaaatccaatcgaccaatcgacttataatctcacagtcccatcgaccacacatgttgaaaaattcaatcggaacccgttcaaaaatgaaaaaacaaaaacaagaaaaatttcaaaatttcaaaattttcccccatttcccacaacttcccggaaccggctaagtttaacaaacggaggaacacagagcggagaatgaaaattatttcaactaatgaacttcagagattattattacgataatgactcttagatgaaatttcattttgattactttaatttatctatcattatttcttttcttctctttggttttcttttatcaacaatcaataaacaatgttatcatcaacagttcgtgcacaatctcgtttagctgcaattcatagacatttctcaacaactttaacttcaaatggtaaaattcaagttaaaaatccaattgttgaattagatggtgatgaaatgactagaattatttggtctgatattaaagataaattaatttatccttatcttgatattgatttaaaatattatgatttaagtattcaatcaagagatcaaactaatgatcaaattacaattgatgctgcaaatgcaattaaaaaatatggtgttggtattaaatgtgcaacaattactccagatgaagcaagagttaaagaatttaaccttaaaaaaatgtggttatctccaaatggtacaattagaaatatcttaggtggtaccgttttcagagaaccaattgttattggttcgggtccaaataaagatccaaatgatattgaaattccaagattagttccaggttggaaaagaccaattataattggtcgtcatgctcatgctgatcaatataaagcaaccgattttgttgttcctgaagctggtactttagaattaactttcactccaaaagattcaaatagttcaaataaaattactcgtaccgtttataattataatgattctggtgttgcattagcaatgtataatactgatgaatcaattagaggttttgctcattcttcttttaaaatggctttaaatagaaatgctcctcttttcttatcaactaaaaatacaattttaaaaaaatatgatggtagatttaaagatattttccaagaaatttatgaatctgattataaattaaaattcgaagaaaaaggtttaacttatgaacatagattaattgatgatatggttgctcaaatgcttaaatctcaaggtggtttcgttttagctttaaaaaattatgatggtgatgttcaatctgatatagttgctcaaggtttcggttcattaggtttaatgacatcctgttttaatgactccagatggtaaagcttttgaatctgaagctgctcatggtactgttacaagacattatagacgttatcaagcaaggtgaaaaaacttcaactaattcaattgcttcaatctttgcttggactagaggtatcgctcaaagaggtaaattagataatacacctgaagttatcgaatttgcaaatactttagaaaaatgtgtcttagatactgtttcaaaagatggtataatgactaaagatttagctttattagttaataaaaaagaatatgcagatactgaaggtttcttagatgcagttgctgcaagattatccaaaaccattgaaaattaaattttttacaaactaataatataaccaatctcttttaattatctttgaatgatattatattataaaacctttctttataaacaatcacctttatatatactccatgtttaattaacgaataaacttttgctatgaatctaatattatactttcttaacgtaatccttaattgcttcctgatcttcttcattttcatattctaataaccaccatatacctttcattgaataaaatgtaccaatcattatactgcaaaatttaataaatggaatcgccaaaactctatagaaataagtatgtggattcaatttattccccacttgttcataatatctttgattgctttgcatacgtatcctgatattggggtatactttactaacattgagtctaggtgctttagttatacggtttaacattgtcgaaaagaaagagacaccgacaaaagttataactaaccccccacaagagcagcggaaatttattttaatttttattatcatcaacccagttatatacacattaaattataccaattaaaaaatttctacagttcaatatcaacatcatctctctccataacatcagcaaactcatctgcattcccatattcatttcgattatgattatcttgaattggatcttgaaattgtaaattattacttttcgaatcaaaccctaccagtctatgggggcttgttattttaggtgatgcaattagcttttttgatgttaatttttggtcatttgataaccttctaaaccttgatcttctgaaatgtaaagaagtcggagagaatgaagtagatggtgacatcttctcatggtaattcaatattccaattcacattgttatcattatttttaattttgttgttttcattagtagttccattatcattgttttcatcctttctgataacgatactagaatttgattcttcccattcttgtatggttgaaatatcatgtctattaggatattccttactaattttcgaaatatttggtgatatatcaaaatctccattgaatacatcatttttttgtggtgttgattccgaatttaaaaataatgatggattagaatagttattagttgtcatatttttggaaattgttaatactcctttattgctatctaatattagtgatgattcaatctctgataatgattcatcctctttcgatgattctaaattgaccctcatcaatttgttatttattgaattaattctattaccttgtctgataaacgaattatgttcttcatcatcattttctgttcttttggtattatgtgtacgctttttggaattattcagtattttcatgtttcctccattagtattggttgaatcaatagcttccatttgttgaatgatattatttattaatccattgattaatgcttcacactttactcttgcagtgtcaagattatcaagactagagaaaatatcaaggtattgtgcaaatgttttaggtattatacccatatctatactaatattgttatcattaaaccatgaatcaaaaagtatagatgattcttcacctatatgaaattccatttttgttttcaataaatccaactgttttaagtataatacatcatcactttctgaccacccgtctatttctctcaaacgtttatggaacgactcagagtactctactaataaatcattcagcttggtattttgattcagagaaagtaatgaatttcttaaatgattgataaatttaagtaaatattctttcaatatagataattgattataatcttcaagttcaaccaacgtgtcagaaaaatctgtgaattgctttaagtgaaccaataacaattttctttttgcaatgttgaatatttgatctgattgtacattttgataattattcagattcttttcaattctttcaatcattatatcaatttgagagtatatatttttcctttgttcattaaatgtattcatctctcttttaacagaaacatccattaaagtttccaattcataaattttcctcttttgatcagatatgattttcatgtaagagccaacatgtttcatgactgtagttttattccttactactttagttttaatttccttagccctattagcaaatttaagcgcatttagagtttcgtcataatgtctataacttggggatatacacacaatcatgactgttttacagttgccaccaagtgaaaacttcaataatcttgttagtttagaatttctataaggaatatgatgattcttcctattatcacataatgcattaatacaattacctaaggctaaaagtgatttatttatatttgccccttcatgtaatcgcagacctgtatttttagtagcacttgccctttcactaccggctaaatcaataattgataaaacagatttagttgagttttccataacatcatttaaaattggagactgtgaaatataaacttgtaaaacggcatgtgatcttgatgatgttaaatttgcctctgtgggagaaacagttctattataattacctcgaatgatcaaatccataacatcttcaacatttgaaacattatatttagataaattattgactataatttcactattttcattttctagtaaagttaacttttttgtatttgtttcaatatttagtaaatcaataatattttcattgtaaatttctaaataactaatttgaattgaaatttctctttcattagaattttgagatacataatcgaaaatatctttcaaagccaggaatattatacctgggctttcaggtgtccctgaaattgtaaaagttttaccacaaccagttgcaccatatgcaaaaatagttgaattataaccttgtaaagcagcatcaattgaaggtttagttgcattttcataaatatctgattgagatgaatcttcatcaaaaagacgatcaaaaatgaatttatgttccttgtgtctcttgttatgacgacctattcttggattttcacttgaagaagaatgtggatcgaaaaccaacattctatcatcaacaacatccacaattttcctaagagttgattcatcaggagtcagtggacgtattcgcactgcaacagaaatagaggcttccttggctatggaattcatgtttaaaaagaacaaatgaacatgtaaatataacactgggatacattaatccttagaaaagtcaagtcaagtgttcacatttcgaaacgcgatacattaaattttcatgtcaaaacttgaatccctccccaaagcagggcagcaatatatagggtataaaattgttatctaatagtacatacaatatacgaacatgataaacattaaaattgatattgggtgttatacagtattatagtgttcattatatacattactctttattattgtaaaggagcatataaaatttgtgtcacatattttcttttgtatctcactacactagctacagctaaagtgttatgtttgaattgatgtagttgcaagatgatttaacacgacatgatttggaatcggaagtgcaccaccagtatttgccttatcattactattataactatttagaataacattttcaagatgtggaggaagttgaggtggaatcagccattgttgtgtatgattaccacgtctttcattattatctaatgtagcataatattcttgcataactgctggatcagtgaaaatagctggaattgatgaaatatattcaactgctgatgatgataatgcctgtgattcatcatagtatcgcgtgtatccatcacccatatcatcatcatctcgcgttagtacctaaccttgaatcaagatgttcttaaagaggcacgatgacctactcttttcagtagttctctctgaatctttctcagatggccatatttccagataattaacaaaatgacctgaatgatcagttgcagttggaataaaacttgaacatttaacttcattatcaacaacaaacttaaatctatgagtaccgggtggtaacgatatttgtacttgaaaagatccatccttttcatttggtccattaagagcaatcatttttctccaaccagtgaatgtacccataacgaaaactctctcaccaccttcggtccaacggaaaacagtgggcacaagcagtgttggttcaacaggtgcattcatttgaggttctgcatcatccatagatacgtctcgttccatagacatctttatcgttcaatttatatagataaaataatcagacaaaaaaaaaacaagaagtagtcaatgcagattaccaattgtagacagaattattatcaaaaattaccttagaaattcatcatcaacattcataaactgtagagcgaacaatgaaattgaattacataatcatcttcatatcttcatatatcttcaactctaatcagtgtttgtttcttcttttaaaggtcacactactacacatatttcgagaatatcaatggatccactcgaacaatttgaaataacaaaatcttatctcttggatagacttccaaaagaattatcatctccaaaagtactcattatttgtggttccggtctaggtggtttagcagatcttctcacagacaatgtctcatttgattatgcagacatcccaggtttcaaagcttctcatgttccaggtcataaaggtgcccttgtttttggtcatttaggatccaaatcaactcctgtcatgtgtatggttggaagattccactattatgaaggtcattcatttttttctaatactttaccagttagaatagctaaattattaggtgttacacatcttatagttacaaatgcggcaggtggattgaattcattatataaacctggtgatataatggtgatagatgatcacataaactttccaggtttagcaggtcaacatcctctaagaggtctcaatttggatagttttggtcctcgtttcttacctttatcagatgcctatgattttgatcttcgtttgaaatttttcaaaattataaaagagttaggtataacaagaaatgtttatgaaggtacttattgttatgtttcaggtccaactttcgaaacacgtgctgaatgtcgtatgctacaaaccattggtgcagatgctgttggtatgagtactgttcctgaagttattattgccagacattcaggtataaaagttcttggtttaagtttgattacaaatgcctgcagttttcacaaaacctccatctgctaaacaagcattaacaaatggtttagatagtatagttgatcaaactgatggtatggcaagtcatgctgaagttttagaaaatgcaaacaatgccgcaaatgacttaaagagattagttgaacattttgtttctaatttagaatagttaatcattgaattttaatttagataaaagacttacagaaataatatttatttgatactttgcatactcggtctttttgtaattcgtctactattgtcaccctcttcaccttttgaagttgtggaaaatgaccgtagcctaccctgagtgttaatctttagcttcatgaatgattgctgaatacctaaactattggtccctccatttggtttattaatttcaattggttcacctttaatcgcatttctcttaacttctttacgtttcagtaattccttagctcgtaaaaatgtttttacccaagtttcatttgaattcacacgaaatcctactctaacatttgaatttagtccacctttgacaaatttacttctatcccatgcacttagacaaatcaatttattaatatttgccagctcaagtatcaaataaccttcatgtaattcttcatcaaattcataatcatataaacttacatttttgttagttaacttcacttcaataattctattataaaaatctctagcttgcatttgtgttgcactttgaggagtatttaaatgaaatccatcatttaattcatatatgaaaactcttgcatgactcgtaataaccataatacaagatttcaaatttttagtcaagctctcgttcatgtttggttataatgctctcaagtattgaatgattcaatgtctttgcaggattacccttatgtgatatctcacttttgaatatattgtctaattttaaaatagtttcttgttgcattaatttgttagttatgacactgggtagttgtttatccatcaatattggatttactagttgttcaggaaatttaccactagttcttttatgtgtaagcatcttaccgatagccccagctgcagcagcagcatcagatgatgcaactctaggttttggtaaaactaattcattcaaacttttattagatgctatggaaggttttggtttcattttattattcatcattgctgatttttgagcataagataacttcaaatctggagataaaggcgcttttttaacaacaactttcttttccaatgatgttatgtttttgaacgatgtatgatttattttctgcgcagctggaattgttgatgtttctggtattgttggagttgattgtttcgttataattaccgatttggaagattcaccattcgttagcatcgaactgaatgatgagcctgaatttcttttcaaagaaatatcatttcttggggtggttttgatgctgattcatttttaattggtggaggaacagtgataccaacctttgcactgcttggttgttgcttgtaaatttttgttggagtaatatttctaagattttcattgtttttcacaaccatctttccgtttgtcgtttggaatatttgattattacttaacttgggagatttcggtttcaaatttgtattgatataatttggctttgttgttgtaatattaaatgaatttgttgactttgaattgattaatctctgccctattgcaaaatctttttcatcaattcgatttgttaggaccttattcatcaaacttgtattattttgagcagttagaagttgctctttaagaatatttttacgtttgttaccaacatttagttcattcaagttaccagaagcttttattgttgtagttggtggagcgttcttttttatcgaaactggagaccctattctttgattggaaattggtgtcatttgcttaagtttaaagtgattttcaggtttataaggttctaatttaggtaccaatccccatatagcattcttatcattccaattaatattttgaaaccatttatgtgattttataccttcaactcccaatcttttattaggatctgcaattaataaacatcttatgagttcaactacatatgaaggtattgggtattttgatggttcagggaatgtataattaacttccacaattttttcaaatgtttcatattcatttgtagccttaaatggtggtctaccaacaaacatttgataaataatacaacctaatgaccaataatcacttgcaaaactcgattgattgtactttaataattcaggtgagatatattcagcagttccaacaaatgatccatttgatgatgtagaatcaatatgatcattagatgtaccatcaatttcatttgtacatcgtttatcatcttcataagtagttcattatagataaatctgtttctgatgctaaattatcattacaatcataaaactttgcagctccaaaatctgtaatcattaatttccaatctttactaagtaagatgttttctggctttagatctcgatgtataatccctttatcatgtataaatgcaattgtatctactaattgaacatgtatagtaaagtgataattctaaacttaaactacccaatcgatgtattagattgagtaattctccatttgatgcataatcaatgacaaaatataaattctttggatcttgaaatgtatagtaaagagttacaattcctggatgtactcctaacatattcaatgtatttttctcaattgtaacatatttctttttcttttctttatgtatatgttgtttattcaatactttaattgcataagtatgaacatttgttctagatactgcacgataaacttttgaatacgatccttctccaatacattctaaaaattggaaatcagcagccgatcgtttccgagtgaaccttcttcatatcttcactattggaatagccattactggctattactgtcccattacgctgtgtcattgacagttgaattagctcagattgatcgttccgacatctacagaaaacagcttctgcaatatgcaattatatacccttcgataaagaaaacctgtgcgagtgcctcctactgtagtatgtaggtgcagaaaatttgaaatcccacaattttcatgtcgcacggggaattagttatctattcccatttcctattcctattacatcatcttttttaattcaacttacttgatacgcatgtcagtgtgtgtatgtagaccttaaataaaataataatcattcttattgtaatcacttgactaaactatgtacatgtacgtagactataaataaaaagaataatgtaataaactatactatttaccaaaataactaatcctttttaccttcaacgtcttccccgttctttttgttttctttttcagagtccttttccttactctctggttcaagtttaccctctaaagtacttatcgaaaagcatcagtttctattaggaaatggtctcttaccaagtaactcaatcatgtcttctctggtaatgacttccttagttaataatctttgagcaactttttcaacttcttcactcttttcactcaataaattacggcaacgatcgtaacattctctaactatacgttgaatttcctcatcaattaaactagcagtcttatcactgaatggtttaggtaaaatcattacctctatccatatcataactaactaaaccaacttttggtgataaaccacatcctaaaaccatcttttgtgccatactagtgactttttcaaaatcatcagatgcaccagatgtaactgatgaaaagtgtaattcttcagagacacgtccaccaagtgtcatagtcattctatctaataatttttgtgtagtgtataaataaatatcagctggtaaatattgtgcataaccaagtgcaccttgacctcttggaacaatagaaacttttaataatggatctgcatattctaaataccaaccacaaattgcatgaccggcttcatgataagcaacaactttcttttcatcaacagataataattttgttttcttttctaaaccaccaataactctttcaattgcttgttcaaaatgtttcagttgaacaaaatcttcatcctttcttgcagcaattaacgcagccttcattacaaacgtttgcaatatctgcaccactaaaacctggtgttaaagtagctaatcgaccctttaaatcttcaatattactttctggagctaatttaatttgtcttaaatgaactgcaaaaatatcttttctgccatcctaattctggattaccaatgtaaattttacgatcaaatcttccaggtcttaataatgcctgaatctaaaacatcaactctattagtaccagcaaagacaacgacgtgatcatcagatgtgaaaccatccatttcaactaataattgattaagtgtattttcacgttcatcattaccacccatacctttacctttacctctaggacttaccaatcgcatcaatttcatcaacaaaaacaatagaaggtgcagttttctctagctgtcttaaataattcacgaactcttgaagcaccgacaccgacaaacatttcaacaaattcagaaccggaaacagaatagaatggaacaccagcttcaccagcagttgcctttgccattaatgttttacctgtacctggaggaccatttaaaattgcacctcttggaatcttagcacctaatctttcatacttttcaggatgttttaagaaattaacaaattccatgatttcttcctttgcttcattacatccagcaacatcattaaatgtgattttaacattttcatccgcattaaatttcttaaaagtctttttgttaccaaacagaccaccagcccattccacctgaaccagataacatctttttagttgaccagaaaataaaaccaaataataaaacagttggtaagattgcccataaacttttccaaagattggttgagtgaatgtacataacaggaattttcttttcatctggtatacttataagtctcttgagctttcttcagtttttcttcaaatttttctaatgaaccaatagtgaagtaatattcaacatttggatcatgatttggttgatttctaccaaattcatttaagataacttgaacagtttcattattaataacaatcaatctatcaacataacctttacttaataacttggtttcaaattcttggaaagtgatttctttatcaaagttttcagaatataatgtataagttaataaagcaccagcaataatccataataacaatgtatctaatctaaattccatttccaaaaacttagttttgtcatcttgagatcgatgacttctgaattcaaatggttttggatctttaccatcttttggtttctcaacatcaattttaaaaccaaaattcttacccttcttcttgaattcttcctctatttcatccatctttttatcaacttcatctttttcttcctttggattgaatattggatcttcttcattattaaattccatttgtttatgttgatgatagtacattaaagatttatgaaatctttgaacattttcaactttttcaccaggaacttctgcttctgggtcttttaaaattacttgcaatcattttacttgcagatggtgaaatcaatccccccatttggtatttattaaataattcaatgatttgtttattttcagacttggtagagtcattccaaatagcttttaattcttttaacaattgcttgagcttcttcatcactatattctctttcacctcgtgaattgaacttttggtgtggtggttgagatgaattgaatctaacttgaaaattctttttattgactgaattgttattaaatgctctaaagttactaacattttgtcttttattgttaatgtattgataattggtatcatttgaatcttttctgtaatatcttcttttaataccagagcttattggtactaccaaaggcgatgttatttttgaggaaacaacaccgctgttgatcaacggtctgaatccattcagttttgacaacattctttgttcttgtcttgtactagtagcaaagaaaaagaaaaaatcgacgaagcatcatccaagccagtgttttgccctccctcatgaagaggtttgctcctattaattttctctctttttcagtcttattattacgtaatgtccactctaatggccaaagacctaaattccgtcattttcagttactaatcagttttatgataataagtttactatatataatatatacgaaatgctgattatataaatctaatgaaatagaaatcaaaaaattgacgagttttattaaactgtggaaacaatagatgaagcattttgtaaaacatcaaccatctttttacattcctttctacgtgcaacggtgaattcgttttctctaactaaactttccatgtttttatctgcataaagtttttctaataaaacctttttgtatatctgcacgacttgtttgaattaattttcaacataatagctttcggcacaacatctgcaactgtacgtttaacaatattgaaataactcgatataagtaatttaatgacttcagtttcaacaacttccttttcactcataccaccactagcctttaagacagcaggtggagcttccattgcagctaacttcttcttattacgtgaactaaagaaacctgagaaaaaaccggatttatcatcatcaggaacaacaccagcatttgcactagttgttgcagaactcgaagtttgatgaagcttgaactatttttgagaggtttaccagtttttggatcaacttgaacagcttgggatggatgtaatttttcattaactaatgaaactgcttcagaaccttttaataaatctggatgagcagtgttaatataacattcttcagaatgaattatatcagcaacaaatgtattagttggtagcataatttccttaatatattcggtaaaaacagaagcaattctatcctttaatgaaggatatctagcaaatgatgattgtgctaaaatttgacttaagattctaattaattcatcataaactaatgtaatacaacgtaatgaagggtcttcaaatcttttaatttgttgtttgactaaaacttcaaatgcaggcagtaccaacaaataatgatggggatgaaccggaactattatacataatagttctaatatcagcatcttttatacgatcaaatggatctaatgcataaacaccattttgaaaacttcatggaaaacaaaactgattctagcaccaccacttaattcatttgatgaaatatcctttgtatgaccatccagaacaccattataatcattacagaaatctgtaatgacacttaaaacagttgatgatggagaatcaatagtttctgggcctaatgaaactagttcgttttgatatttctttaaagctgtatcaatctttgctctaatatctggtaatgttgctctaatatgacttaaaagaataacatttaatttttttgctaaataaggagtaccacaatattgtgccttagtagaatatgaaggatgattttcaaagaatttagcttcatcagcaagggctgctctaatagttttatgattttcaatatctttttgacctctattaataacaggaacataacctcctcttaaaggaataactctaccagctaaaatatcaataacatcagtaccttgatccatcaaatcaactttagttaaaacaccaattgttctaataccttctgggtcaacttctcttgctaattttaaaccatcagaattagctaaatcttgatttgctgcattaacagctaaaatgattgcatttggtttagaaataaatttcatgatcatatctctaatttgcctttcaatatcaactggttgatcaccaactggcactttagttaaacctggtaaatcaaccaaagttaaagttaaaacatgaggagaataaattcttaaattgattggaactggtgaaataccggcatttttaccagcagttgtatcagttgccttaataatttcttgacgaatttcatcaaaattatagaattttttaccaggtaaatgtaagaattcaccccattcatcagcattattttcagttttttgacctttatcatcatgtgtttgtaaatctaataaatcaggaatgtgcattagttgaagcagatcttgcaggtcttctattaaacaattgtaaaatcaatggtcttctagtgacaatacctgtacctcttggtaagaattctctaccaacaatgttttccaaaacggaagatttacctgaagattgtgaaccaacaacagtaatttgaggaagatcaattggagaagatgaaccgcctcccaatggtgccaaagcatcctgaagcttgttaatagtagtgattaaatgctcatccatagtatgcgtatttaaatgagtatatgatggatattgatatataaatcaaacaacacaatgatttgccatcaattattcgtttacccatgtgtaacttactctctgttactatttttcttacctggcacaaattggtggctgagaattgtgagaagtaacatttccccaatttcttcaattattgcaaaatgcgcaggcgcatcgacccaaccgagagagagaataaactttttattttccattcattctcttatcttatcttaaaactgttcactttaaaaaattcttatctttggaaattctcacatgtcatcgtcgaatttgttatctttttcactgaatttttcattagcatatcagttatcaagcatattttccacatgattcttatctataaaccacacttgacaacagccttattttctcttataatttctatcatttactataaatattaccattcccaattctataatcacatcacttcatatatcttagagattgaatactatatacaattacaaaaatctccttcacttaataactatttgatcttatttcatttaactaaaaaaaacgccacatttaatgattgaccttaatctaatattaccatacacacttctcacaattgtaataccaacaattgatcttattttactatgtttcctttctcaaaaatctaatatattcactgatgtgtacttcttcacaaacttaattgaactttttgatagtgttttttatatcaaaaaatactgaactacccagccacactaaactatttgctatattttcaattttgatatattcatttctaatctattctactaaaaagaataaaaatgatacaattaacaacttaccaaatacatctctatcttcattacatttatccactgatgaaacaactccaattatttcctcaaatagtgaaatagattatcaaacttttaaaagaactttacaaccaaaaagaagtatagaaacttccttaatcaaccatattgcttcctctttaatgaattcaccacaatctgttagaagtaatgcacaagtttccaagaaatctcttgatctactattattcaaatttgactgatgtaatgtctcctgcaacaaatgttcccgtacgatccaatcacaaaaacggtttgaagctaatcctattgatgttattgatgatgatatagaaacaattgatattacaaaaccatcaaaagaacaagaaaggcaattgctccaaaaaatctttcaacacttcaccaatactatcaactttaatggctctttcaacacctgcagatgctttgcctatcaatatcaacaaagaaaatgattctaaattaaatataccaattcacagaatcatattttatattgataccttttgcattatactttttcaattactttgttgaataccaggtttaccattcatgacataaatgaagatagtgataataactataacttcttacatcttacaaagttgagtttgattttaagtttcttggattctattttcttacagtgtttacttatattccactgttcaaacagaaataaaaatcctactctacattcaaacaatagctacatttacttctttctctctatgtgtgttgaagcttttcagaaataaattatcgactgacaagttcataccacttcaaataactacatgaatactttattcctatttacaatataatatacccccttagaaaaactttctgtgatgctgtgtttactcttttatttgctttttacagttccttcattatgaaatcaacctttttattatataacagttatatttaaaaacttccatattttggaaccattcgtcccattgtatttatagaaaaaaaaattatctaccaatattattcaattatttactatttctttcagtgaccactctccgctatctaatggacatgaatttctagttttaatccaggtggatatacaatgtaaatgaaaactatgattacatgtaccaatagctcttggacattttatttgttcactattacctggttgttctgctttaccttgacaatcaatacatggctccattaaatgattacgacaaattgcacatgtttcattagtttgatcccatgaccaaaaggcaactgctgtccatttctttatttcaaatcttttcttctttggtttttcctttttggttgtatctgtactagacccctctatttggttctctaaaggtgcatctgtattatcagtatccattggttcagacatgtttggttctttatcttcaagataaacttacccaacttcagaagcaaaggcgcaaaattaatgttgatgaaatttcgtgaagcttgtaataaaaaaataaaccatgcatgcttcatgaaaaatcaacaaaacgttattactgttattttaagctcattcttgtttactataggtaaaacgtcatggataatcccgatattgcatctttatatccaccacctccaccgtattataaattttttaccaaagagaatgtttcaaaatacatacagttgaaagccgatggagaaaccgatgaatctataagtgagatggtgaatcttaaatttctggtaccacctaaacaaccaaacaaagagcaatatagaagttttggtgaattatggtggttcaaagataaaaatgtcggcttaaaagaaagtggaattgaacaaatttatggtgatagtatactaaaaccagcatcggatgatgtttcaaaagataatgaagatgtcaatgaggaagaagaggaagaagttttttctaagacacgtattgaagaacttaaaaaaatgacaaaatcagttttattaaactttcttgaactggtgggtgtgatagctgaaaatccagaacaagctgcaaagaaaattgaacatattcgtacctattttgatcaatatccatcatttattaaattcttacagggttcatcaaagtcgagagactttgatactaagattgcaagaaaagatatcacaaacacaggatgaaatcgacaatataaatgaaacctgtgaaatggttgaaaccaaaatgaaagatattttagcacatatcgatggcttacaattaaagactaaagaacaagaaaaaataagtccccaataaatccaatacccaattagataaacattcgttataaatttatgtacaagttttatataacattaaaaaaagattaatttagaaatctcttatttagactctatgtctgattctggttcagggatattaccgattatattagagaaaccagtaaattcaacactcatatcgtcatccacacccattccatagtcaaaaacaccaccaatcattgaattatataaattttcatcttcaagtgtccatttctcttcgacgcctattgttttaagttgtctcacaagaccattaattatgaaggaacgttccaataaatttctttcgtatggatcaacactaccatcaggtaacatgttttgaataataaaagtacgtgcattaggatcaaatttttcctgagtttgtattactatcgaagcctgatgcaaacattgaaaactctttctcgggcactataccatcaacatttcttgctcttcccattatcatggctaagtttgaaggtgttttaatagcatctgtacctaatataaatattgttttaagaccagctaatgtaacacctagaagagatgatgtatttgtgacatatagatcgatatcatcctcagttttggttgatttatcaacaaattgtgtagagtgttttcttacatccaacactgcaatttttctcttagttttcttggataatttttcaacaatagagttagaattcagttcatctgaatgcactacaattgcaggttttccatctttcatccaatctaaaacatcttgtttctttaatagtttgcctaatcctgaacataatatttcaatttctcccattttgacttcttgtggaattgaagaccattttgtatttctatgttttctatatgcctccgaatttccatatgaagttctataaactttgtttaaccactctctaggggtttctccatattcaaatggtttcatatcatacaaggtaactttaaatttgtcagaagtttcattcttaaatctagggagaacaagtactgtactaactgcaactttgtcactgatatatttgtaatgcggaacatcttcttcatctccaaatttaccgattggtgcaaatttcttccaatctatccattttgtatactcttttaattgttgaattaatgaatctgttgctgcatcattagttgttaaaataacttgaggatgtgggcaattatgcatacgtctatagtcttgaagttttaaaacataattcatgagtttaacaaccggtgcttctttcttagtttctaacatcaatgtttcgtcaatcatagaggtgaaatcatcaactgcaatatatgataatgaatttattttcacaaaatccatacccttactactcaaaatatctaataatctttgtggagtagctaccagaacatgaggtgcttgaaaatctgttaaatcatcttcttgttgtaattcttcctcaggagttgatctatataaaaattgaacaatatttttagggattgacttgctgatccgttcgtaaattagatattataccattgacaacattttgatattgagtgacaagcgagtttgatttgacaagaattaaagaatttatacctttacctttgatattcattctacgtaaagtcaatgcaggataataacagtgaaaatgatttaccacaacctgacggcccttttgctacagtactaccataaccgctcattaaggcgaaaaatctttgttcaaaattggtcaatggaaaatcagcataactttcctttgaataagaaacatgtcttcttttcgacaaatatcgaacaattgcagtactcagtggataatcaaaaccaacattaaaccaattcaaatctttatcaaggtttaactttatacgttgatctatgggaagaagatgtttcttattgtaagattcaataacatgcatgttttttgtaatgtattcatctattggagttttaagacctttgtcaacttgattatatgctttacggtatttcgttctccaatactttggtccaactgatggagtttggttattatcattttttttatctaaaccatttttttgaaattttgctagacttgatgtctttctatatgatggttcatctcctgagttggtatttgagccataatgcttcttcagagtcttcgtttaatatatcatttaataatttttcatctgatggaatctttgtagaaaagttacattttttattagtatatcgtattaaaaagttgtacaatatggaattgtttgcggtggtcactttgaccattcccatttaactaaatatcttatcttttttatctgctgtgtgtatatgtttgaacgaatcagtagaaatctaacttaaaattcttattcagcatgtaaaaaaaataaatacatgaaaaaaaaaatttcaaatgtcacataaaatactgtcgcgacgccgttaaaagatttctttccaggtttattttcttcaattaaactcttttacaattttgacactgtaaatattgaaagaacttttgtagtttagccataattcattatacaacaaacatgcttagaatatctacaagacaaacctgtctcagctttgtgtaaagccagaactcaaactaatatcactaaatgtttcactacattccaatcaatacgtcaggaagatgaatcaaacaaacatggtcattctcataatggtgtaccatgtggtggacacagtcatagtcacaatcattcaccatctcattcacattctcactcccactcaaatgatggaaatgttgcagcgtgtcaagatggataaaccaatgttaatgttagctttcacatgtaagaaatgtgacaccagatcttcacacgttatttcaaaacaagcatatgaaggtggtacaattctagtacaatgtccaggttgtaaatcaagacatttagttgcagatcatttgaaaattttctctgacaatagaatcaaagcttgaagatatattaaaggcacaaggtgaaggtattcaaactggtactagaagatcttatctttgatgactatcccagaattcattaagatcacttataggacaccatgcaaaggatgcacctgctgagtttcaaaagaagaataaattaccagaagagccaccaaagattgcagatgattccaaaaattaaaataaatgaaatgggcaattttcctgaaataaataaatattaaaacttgtatataaacaaattaagttagttgcattaatataatttatcatcattattccttactttactttcataagtaactcttctttgctgttgattattaaaacaatgcctccaagatccagatatataccgcaatcagcatcttcaaccataaacacggatatgttctccttgaataacaaaaaaaagcaatcaaattggttaaacaaaacatgctttgttgataagtatcaactattgtggtttatagctcatgttaatacacttttgggatttgtgatgtatgtaacttgtttattaaatccaggaaagaaatttttagaaattaatgtcctggtacaaaatcactaactatcagttgtattttaacatattcaattgtaatatataaacgttatttatgtgatgatagcattgaaagaattgaagctggtaataacatattcatcagttacatattaaaaactgagaatgctcaattaatcatttcagctattctttggtcagtaacagaagaatcgatatttaagttgattccattcgtaatattattcaattttgaatatatcttgcttttttgtttttgatgcatatccaaaagaaactttctccgttgctcttgcaccatttatttgttacataaaggatccaagtttagtattttcagcatttaatgatgttgcagttattggtattttgttaaatgaatcatactatagtaattcctattatgctttctttctttatgttttcatttggggtttgaaagttgaaaactccgaagcaagtagaattgctctttacaaaattgttccaattctttgatacaatacttacaaattcaatatgttcccttgaagttaagattaggttggagtccacactaagaatcaactttgtcaagttttatcatatcctgatatctgtaaatcatctgaaaaagctacttttcagactgatgatttgaaagtagaagagaaagtcgtatactaatcaattgtatttttatgtgttttataaaatctatgtattatacaataagataatatcggattaatattattttccatcaccaactatgaattcataatttcttgttttaactcttgtagagcctcaaaaccatcagtatattcccaactagatttacccttagatattaaacttctaatagtactattagccttaaatttccaatccttacaagcaacatcacctgctccgtgtcttccttctaattcaccgaagttttcataagctgaaaccaattcttgacatgcttcgacagcaattttccacacattttcatcagacgttaaatccggattatttataacagctctataagatttttcataatcttctaatgctaaccaaggtttctttctccaaaaatcaactttggcaacgattctccaaatacgagaatcactattgacaacacttggaatcatgttacaaatgaaatcagttgcggttttttggaaatatgtttctcttttatttgcatcgaaaggttcagaagttaataaatcagcaattttttcaacaattggtatatctattgatgttgtactatgatctaaatctttcttatcattcaataaaactatagatgcatgtaaaacttcatcccatttacctaatttcacagcaactatcaaatagttttcccaaattttccatgatttctttgtagaatcaccagagttgacggatttttgtaatgcagtgaatgcttctgaaattttatcgagttgaattaaagctgatgcaagattggaccaagcataagagtttgtatcatccaatgaaacacatctcgtgaatgcttctgcatgcaacttcataattaccaacttctaaacccatacaaccatagaagtaccaattttgaaagttgattggatttgcagataaacagtcaaacatatggttgatagctgtttgtaaatttttttcaacattagaatcctttggtggattactgtaaaacttagccaaacttctttttgcatttgcatatcttccaatactccatgctttttcccataaacttggatcattcttaatatcacctaaaacagaccatgatctagcatcattaggattatactgtaaagctttttcaacaagttctacacctttatcagagtcaccagttgcggcataacataaagcagcatctgtccatttctccaatctttcgtatatttcaagagcactctttaatgatcccaattccatcaatttttcagctaacttagtatccattgaccattttggcattaatggtaaagtataaatatatcttaatctagtagcattagttaatgctacagtaatatcggttgaatttctaaactcatttggaaacttgacttcatcatcagtttttggaaataatctagcagtgtgttcacttgtgacacctaattcttcgactaaagaatataattgtaaaacacctctttcaacaggtacgtgatctagcagtttctaataaagaacggtaccataatgctctagagaaaattaaccagtttacatattcagaagatgaaaataaaactctttgaataacagcaattaattcttcattaacaagagtatttccatctggtgtgttgttgtatatagcttgcattcttaataaaagttgaatattatcgagattagccaaggtgggttggtcattagggtcaatattatttaattcagcagggatattcgattcttttactgctattggaattaattttttatcaatagttgttggaattgcatcattcatagttgagtaatcaatttttattcttttagtaaagtcattttcaatatttgtttcttcatcttttaagatttcattatcacctaaggaatcaaaacttggtttttctaaaaataaatcatcatttaattgaacatcttgtggtttgaaacttttctcagactcttctgaagataataatgtattggatgattttgctagaactgttaaagttgcagttgatttagtttgatgtttagtcattcttgccttacaaccagttaatatcaaggacatacctgatgctttatttgcatttaaaataaaatccaatgtttgtacttccaaatctccagcaattgaaatatttgcgttttctaaatagtaacttataagaagatattgattagctttggaatttacgttaacagtatcaataagtgcattgactgtttttttacctaataactctaatgataatgtaataatttctgatgaaatctcaggtaaaatagattgttgaacttgtaaggcacgagctctccaccaacaaatagatgcattaatgtatgcaccctggttttgttcggataaaaagttaacatcaaaagagttttcaataacaaagcttgaatctaatttgtttttttctgaacctaagagagaaattgatgttcccttgtagtctttcaaacatatgtaatgataaaacaagaaaaaatggtgtttctgaaaggtgatatggtgagtaaccgctgatactcaataaatctaatgattgagtttggaaattgaatttaaatttggtgttagtattagttgttgtgaaaagaagacccataaaaccaatttctttatcagataattcaaatggtaattttggacctgaaaaattagcaacaacaaaaaattgtaagaaaaggatagcaataatcaatgtataaattttcttgtgttcttcagatatatcacaactattaatattttgtttgagaatatcagtgagagtattgatgaaagtgagtaaatcttcaccatttgaagatacatagttttgagttgcagttaagatatcgttattttgaaagaatatttcggaaaataatttggattgaagcagttgaaagtagtgaccattgactattgcaaggacatggttttggatttgttcgtctacttcctcatgattgttatcaaattctattttagggttttgaagaacaagttttgccaagagggtcttcaaagacatgttttgtttttaaatgagtttatttggggataaaagagttggacttttaagagtctggattcgaaaagaaaaaaatatcattttcatgaaactttttcaacatcagtagtgtgaacttcacagtggaaaaaaaaatggggctcggcattttaaggtcacgtgtagtgtattttgactgtcctctcaagagaagaagagtgtctacttgaagaccttctttcatactagtcgttagatactccttaatggaatgaactctcacacaaagtttgtaacagtgatggtcatttaaagaaaaaaatacagtgaatagtttgaaattaaaaagatgggtttaggtttttatacagtaaaatcatacaattttaatcaaatttaagatccatgagaccttcacaatctttaaccatgtatggataccaaaaaatagttggccaaatggtaacaaaatgccacatagcatgagcgtcaatcaggtcaaaaactggtggaaaatcaaataattcaaatgacataccaaaaataacactggtgactaataatattggtgttaaagtccaattaatttctttacttttgatattatcaatcaagctgagatgtttattacgtacttttttgaattgtgaaactgatagagttacccataatatgttttgaataataccaacaacaacatttgcagccatattgtatgtatatgaccaatcatttaataattttgtaacatgagtcaagtacatgaaaatacatgaaacagcaagtaataatcttttaaactgattttgtgttttgtataagctaaaaaatctaacattgattgcgtaaaatccagttaaaacagtcaaacctgcaaagaaataatctaatctctccctgttccaagtatcttttaaatggaaaatagtagaaaaaaaccaagcacacattgatgcaacagcaacaagagcatatgaaaaatacaaatttgcaatttcattattacctctttcacgttgtaatttataatgtttagataataatttaaatccccagtagtttggaataaagttaccaatactgaaaagtgcactaaaaagttcctgaataccaaaaactctgataaatggccacttaccatggaattggtgaatttctttgtcgtcttcaactctatctattgtaatcagtctttgacattgataatcacaatttgattcacatgaccaacctagggcttttaaatgtaaaccaagtggcagtttatcgaataaactgattaattcttcatctttcatcaagtttttataagcttcctgggatatttgtgatttgtggtgttttgaatcttcacatgagataataatacaatattgtaaacatttttgaaattctggtaattcatcaccaagagatgcaaccgttagtctagtcaatgatagcactgaaaaaaatagtgtgacaattgatgtgatactagtcatacctctctgatataccaattcaatgcctttaaattaaaagaatgaagttgtttaattgatgcatgaagaaaaagatggtaatttcggcaagacaaattttcaagctaacccgttaaagtataggatctttaatcttttcacctttgtttccaatatatacacaatgagtcgtcatcagctggacctagtagtgtgtcagagactacctggaacaaaaattggtcttctttgccctaaatgtgatggtagatgtccaacatgcgattcttacgtgaattctaaaagaaaagtacatatttgtgatgaagtgtgcatttggttcaatgggtgaatgctgtatcatttgtggaagtacggcgaggccaggagaaacaatgaatgaagcctactattgttctcaatgttgtttgttagagagagatagagatggatgtcctaaagtccttaatatcggtggtttacgttcagactattattatcagcaaaagaaaaagaagatagaaactcttaaataataagattgggtcgttaatttataaataattatatcatcaaaatataaagtgataaagaaatgagtttattgcattattgccatcaataatgctagttgttagtcttggattcctgcaatattgttatgagaatagtgttgtagacgtctcaaaattaactctaatgttttagacttacatttttcataccataaccattctaatttgatagctaatattttcgcagttgataaaagctcttctgtggtctttttttgtaatggtgtagttatcagcagttgtttgacactatataaatgttctaataaatcattttgatcatctgtatttttatcaaacataaattttgaatcatgactatccaatgaagaaattgtacttgatgatgatagaatataatttttagaagagattgatgcaacttctgatgattgttgacggttattagatacttcaacgttatttgtggagtgtcttgaaatttcattgataatatcatccactgtatccatactcagatttgcgttttcaaaagcatcaacaagttcgtgatcactatcttctgagtcactgatcgcaccggatacatctttattacaattcaatgaatgaactggagttattgtattcataactgaaactgaatgtttggtgtgatctaaaacagtggtattacttctaattcttgtttgattaatattttctgattgtttcttttgaggagatctttcattttccaagctggtatatttatattcatgttccttaattttcatactttttatctttctgttaacagaaactgtaccaactggtacaacttcgtaatattttggttcatcttgtgctcctgaaaatacgtcaagtctatttctgggtatcgagtgataatctaagggttgttgtttcatttttatttttgataatgagctcattatgtttatactgtatatccaggattttacatctactaatgatgaaaccatgtatagattcttaaagtttttgccataaataaagaacgtgtattttgcaaactttgagttgttgtctttggacttcttagatgaacttctcttctgtactttaatagtatcgttttcatttttgtgaacatctttttcatttagttctgtaggagatgatattgaagtgttgataattctatcatattctaaattctggatttttctagtagcaaaggaatctgatccaataatgaatgcaggtaaattgtttttagtttgtactgtttctttttctgatttactaaaatatggaaacgtcataaatgtagaagaatctgtatttgatgaattaggtaaaatgctatcctttaaatcttcaataataacggttttggtattatcttctggactaataccacaaaacctcatcctaaattgtgaaacaccctcaaagaagaacataccaaccgttgttaagatacagaaatatggtttccaaattttatttgattactcttattcttagttttatcattttgaatatgatcatttaatgaagttttattctcgatgtcagtaatattagtaatatcatttgaaacaggttcaggtacgggtatagttgttactggtggggtagatgagatttcctgtttatcaattattccaatttttataacacgagtaagataatattcttctatgcttgtcgatgcatttagtggtttaactatggtatcaaaagaattcaaatattgacctttattctttggaatcttcaatgtgaattctacattacttttagtaagtgtattccagatttttataagtgttgcagagtctatttcttcctcaatttgtttggagtaatcatccaattgattatttatcatttcaatagatggagtctcaaaatcatctccattataaatgtgatcattacttgctggtaaaaatgggtttaaacagttgagttttatgtcattatcttttactttaaatagcttgagctgattaatataactaatgtcattcttaataatggtatcataaggatctatcatggtgggaccactccataaaaatgaagtactcttttttcttacaactgctggagaagagatggaatattgagatgttgattttgtcaatgatgcggatgattgattggagataggaccacttataataaagtttctgttgttatcattagcagcacatttagagtaggaatgaccgttcaaaaaagttgtatttggatatggaaataataatgatcccttggattgcaaagctaataatgaaagttcactttgttcaggtaagattttaataagcggtgtataagtaatattatcaaataaataacccaataattctttaactattaaagtagtcaactgactgtatcttggtccattattattatcctcaatagcgtctaagacattttgaataaactcgaatcttgtcatttttcttttattatttggattaaatttatctgtgtgtaccataattaaagaatatgtcaagatataaacattatcctctgttaatcctagatctgagttacaattgtaataacgttttgcaaactgataaatcaaacgatcaatttgttgagtttctttgggtaaataatttagcattaaaaattttctaagtgaaaaatctaaaggttcgtgtttgaagtcgtaatatgtttctaaataatattctaatgaacgtctagctaaatcattatcttccaatgatagaatttcagatattgaggtaagtcggtatattttaagtaatttgttaatgaactgttcaggtgtctcatcttctgaaatattcaaatttttcattttagatggtgcagtcggaggttgatgcgtatgcaaagaggcagtagagctagatgatgagtttgagtgtcttaatgtagatgaagttgctgaattactgttgattttaacaaaattagttattgatgatagtaacccggtgttacttcctgctaaatcaattaatggattgtcgatggtatccatagttttcgatctttgtcttagatgtgagttactaactctattatgcttgatatttcttcttgattctaactcctctttcaatggtttatttggagatatagtatttttactatttaatctcatagtattgaaataagcctgttgacttttagaaggtaatgagtcgtctagattaacatatgaaatgatttctcttctttcagcatcagtatataaaattgatcttctaataacaggtagctcgttttctagtgagtaattttcagaatcatcagaacatcttgaagttgatgtaattgtactatgagaatccataaagaaaattgatttagtggtacgtttgagcatgttcaatgattttccaatagtacttttctctgatggtgttgaggagctaaaacttgaatttctattcaaatctgaagaatttaaaggaggttgaattggtgatgaaggtttaatacttaaagtattgttcatggatgagcgttcgggggataatggcacatcaggtatattattaaattctctcttagtgggagactgaatgattggtataattgacgagttacttgaaattctattttttgagtttttgctttttggaatgtttataaatgaatgatctgataatggcgtgtcggtttgattagaaatggaagacattgaagagaaacgtttaggaatcaaagatgcagaactaattgataatcttttcacattcttctgtaattttgattgtttactttcacctatattagttttctttgataatattttactatccattgaatcgacagtagtagtttttagtttccttgaaggtagccaacttgtcgaatttttaagtttcgttgacattttcttttgtttgacattttggtattcaatatcatcactatcgttatcatcattctccaatgaattgacctccgaaatttccgataaatgtcgtgaaatggatagttcagatatgtttgctggcattgaattttgttgaacaccaacatcattgcgaattccacgatgtccttctttcaatgacatagtttcaatgtttatataactcaatcagtacttctaaagctctattataatatagaaagagtctgttaaaagatagatgtatgcttgtcgtatgcagaagtatgcaattctatacgaaacagcagaaaaatgcggagactaatcgtgtacactgcgggaaaaagttgtgctgatgaaatttcaaagggattgagactaaaaattgatcggactgagctgtttatttcatgtacattgagataattacctaattttcgtatatatcatcgtataaacacagttcttttattcttgattcccttttaattgagcattgagtggttatcagcgatgtcacatccttataaatcaattgtaggatccaatgaacatcacaggaaacatgttaatcatcaaatacagaggaaaatacagctttcagctgttgaggagcattatttgaagaaaatgattataaagcaacaattagaggctgaaatcaattcactgtcaccggaatacaatgatagatcaggattacgtcgatttggtcccccatttgtaccagcagatccaaaattattattaaatgattcagatacttcaacattagaacagatctacgcaatgtctgaactaagtatagatgtattccgtcaacaattcccattattaagatttatatttgataattttattgtaacattcccatttatcaagattcatttgagtaagatgggtaatacatatcttgaacaatctaaattctggttgaaaatacaaatgttatttgagttgtttaaaagtaaaaagattagtaattccaatgatagaggttcaacaagtaaacgaagtatgattgtcaggaaatttcaagggttattcctttcattattcaattctgcaatttattgtaaacaagatgctgaatatttccagatggataaagaaagaagaggtgcatctaagaaattaagtaaatttactgggtctgaagaaacagaagaatcctcaaaggataaagaattgaaaacatttatagaattagagaatgatatgaaggactcatcatacttattagagaaaagtttaagcacgtcaacacttttagatcatattgatgaaatcaatgatgatgattatattaacggctattacatcaatattattggagtttctgttgaaagtgagacaaaatctacattttggggtgctaaagagggtaagtattatactttcataatacatatcaagcttccgaatgaaagagggtactttattaaaagaagatactctgattttgagcaactgtataaagatttaaaaacaaaccatccaggaattaaaattccagaattgccatctaaagataaacataatgttgaaatgagtaaaggtacaaatattgactcaaatagtaaacttagataatgaagaatataaaaacttacatgagctagattcagaatttgcagatatggataaagaatcattagacgaactattccaaaactcattcaataacaatgttccaaagattgtagaaccactaagtccaccaccaactaaaagtatttttggtaaaccaagtaagttaaaatcaccacttggatcaccaattttgtcatccccaagaaagacttccggtaaaaaggaaaattcattcttgagtaattttaaaaaaccgtggactggaagtaatggtagtaatggaggatcattgacacctggatcaccaatgtctgtctcttcatcaagctcatcaatgagtcataaacgtaatggatcatttggatccactaattcaattgattctatagacactgtagattcagatgatacatactattctgcaaatgcatcagctaactcatccaacactgatgaaaaaatggtattcccacgtgaaatattaagacaatcattaagagggatttctaaaatacacgttattcattaaaacatgttcagaaagtaaagaaatcaagaatttttttcaaaatgataaaattgagttaacaacaaaggaaatacatgatattcaacatagaatcaatttagatcatttacgtaaattacaacattataaatttcaaaatgcattgtctagtattgttacagttctagagaaggatgttgaacaattaaaaattgaaatttataatgaaggatttggatatatttttgatagaattaagaaatttaacacattaagagaattatgtggatatgattatgaaaggggtaatggaacatggttggaaagagcatatgagacctaatgctactgttgataatactgatgatattgaaattgataaatcatataaaccattaagaggtcttattagagttattttactagaaatagcaagtacacaatatgaaatgttaattggaaatgatagtgcaatgagtactttgaaaactgttaagaaattacactccattttcccatatagaattattgccggagttttaagatttactaatccattaatgatggttaagagaatgattgatatattcacatatcaaatgccaaccatgtcaggaatgactggtggtagtgttaatgcaataagtaatggattaagtggtatgatgcaaggattaggattgaagaagaaatcgggaagagaagatcttgttgaaaatattccaaagtagttcaagtagtactaataagggtaaatcattattacaaatgatattttctagtatgattggtgatgatttaaggaaacttgaaaaagagatcattgaagttagtgatttattgaagtcagttcaatgataacgacgaatcatcatatggaaatggagaattgataattcaaagaattgatgaatattttaagagtgatgatgatgttgtattaggtattaagaaaatcagtacaacatatggaatcgatctacctatgagtattttaatgccaaataatggattaaagaatgaagaattgaatattgaatatagttgagaaattattaaatgaatgtcaaaatgataaagaaattgatgatgttacaatgtataaattaagcaaaagatatttttttactcaattaaggaaatatgataaagaaagtttaattgagttatgggaagaaccagaattagttgaagttattaaagaggtaattgcaatgttcttatcgccattaattgaagttttcaaaaaagctgaagtttacaaatatgtcccaatatttgcacattatatgagtgaattaattgaaatttgcgaaacatatgggtatgattatggtacttttacgcgtagtgatatagttggatcattagttaaattagaagaaaagtattctgaggatgtttataaatttttaagagacatttacaccaatgatactaatggacaattatttgaaggcataattgaatggttaaataagattacacaagttttaaagaatggtaagcgtggtgaagttattgatgttgttaaaattataaatgatagtgagataagtgttgaagataagagaaatatattacataatatacaattagcggttactaaatctgaaaagaagaagaaagcattagagaaagcggagaaagagggtgaagaaaaaaatgatgaagttaaaggtaatattgagaatattgataatgattggttaaaaatgggtagagatagagcaattgataaaagatgggacgagattcataatagagtatttgatgttggagcagcagtagcaggcgattgggatgatataggagatggattaagcgagaatgaagatgattacagtgatactgaaagtgaagatggtgatactgataaagatggacttgctaccaataaattgaatgagtgttgcaatgtaagtgaatttatcactaaatacatgaaaagcgggattgttattaataataccagtagcactgtcaaggagatatcaaagaagggaattattccagtggtggtgacgaaagagttcactagatgtacgcttgaacttctcccatgatgattctttgtttatgaaagttgtatccatccgcgatgtcacgggcaagattggcaatgcttcaactgataagatgtatttattatagtcatcattatctaatcttaaagagagcgggtctatggtttatactctattatctacatttaattcgtaaatttgtacttaaacacttacttcgttcattttttttttctcatctaataaatccttatttagtcaacccagagcggcaaacataattcgacttttcatttccattaaacgttgaaatttttttttcgttatcacaaaataccgtgccgaaattttctagtatcacaagcaactccaacgacaatgagttcctatcaccacaggcgacacgtataaaggctcgtagaaaatatagtgttctcttaaagacacagtgttaaccttcaaatattttcatgttttaagacactttataaaatatctgctttctgctttttccccttttatctttaattcgtcagtacaattctgtttcagtactttttaaccacaaatttcaatttattgatatcgtagttatataatagcactgatgattaagtaaatacaatgatatagaaaatggattaagtggagatggtgatcgatacagttgctaccattaaaccggacaccgccacaaacccaaccacacacacatcaaagtggcggtgcagctaattatgcgcgcttgactcggacccctccccttccttctctctgaaatctctctcagagcttcactgtcactatctatccgcggtgtcactgtttctatacactattaacagcaatatgctgaagtaatggccgtcttttaactgataagatattctaatcataaatcgacgatacatcgttggtttatattatacatcatcgataaattatgttattcgtttctatttaaacacttcatcattccctccacctttgtattgtaggttattagtataaaaaaagtttctttcatttagtacaccctaagcggcaagtaaattatcacttttctttttttcccaaacattgaaaaagaaaattttttttgtcgaaatcataataaaacattgacctgatttctcaacatcgttctgttttctcttaaaatgactttacaatttcttcgttctccaatgagcaattccagcaataatgatttcctatcaccaagggcctcactaatgaataaggtgtcatcatttcacgataatgataaatatgtaaataaatatcatcctgattatgtcccaggtactgcaaatattcttttagaaaaaattgatggtaaaattgaagattcaactatgaaaactaccgcttctggtattatcttacaccctcaaccaactgaatctccaaatgatcctcttaattggtcagtaatgacaaaaacttatcaatttgcaatcttaatttttattactgctttcactgctgcaacttcaaatgatgctggttcagttcaagattcaatgaatgaaatttatgatatttcatatgattcaatgaatacaggtgctggtgttctttttgcttcaatagggctttgtacttatttcctcggtccttcagcttctttatatggtagaaaacttaattatttcatctgtatcatattaggtttagttggtgctgcttggtttggtgcggcaaagagtacaactgatactatatggtctcagttatttgttggtgcttctgaaggttgtgctgaagcatgtgttcaattatctatctctgatatgtttcatgcacatcaattaagttgggctcttactctctatattttagctacctcttgtggtacttatttaggtccttttattgcaggttttattgtggaatatgcaacattcagatgggtcggttggtgtgcagttatcatctctggtgttttattagcatttctcgttttcactcaatatgaaacttattttgatagatctagatatgttccaagagaaactcatttatctgatttagcagctatttctgaagaaaatgaaaatattcaactaaatgatagtgataataaagttgatgcattatcagttgatgaagagaagaaggttgataacgcagaattgaattcagaaacttcaattgatagtttttacattttaaataatggtgctgatgaaaagccaaagtcctactggaaaaaaattgcacttattacacctgctacaaatttagaaggttggggtattaaacaatatattgaacgtttaattggtatgttacgtgttttctggttccctccggttgttttatctggtatcctttggggtttacaagatgcatttttaactttctacttaacaactgaagatgatcaatattatgatcctccattcaatttatctgatactggtgttgctttaatgaatattccttgtcttattggttcagttattggttgtttatatgcaggtatcttatctgataaattcgttctttggatggctcgtagaagaaatggtattcaagaagctgaggattatctttactttttagttggtgtctttattgcttgtcctatcggtttaatggttttctctgcaggtactgatcaactatggggttggagagttacttatgttgtaggtttatcattccttggattctcatttggttgttcaggtgatattgcaatgagttatttaatggctgcttatccagaaatggttattgaaggtatgattggtgtttcattaattaacaattcaattggttgtatttttacattcgtttgttcattatggcttgatgcaatgggtaatactcatacttacgcaattttaactggtattcaagtactagcttgtttcgctgctgttccttttattatttggggtaaaccaatgcgtgcttggactaaaaaatactatctagactttattgaaagaagagatggtgttcatagacatggtgttcatcattgaatattttcactttttaaatcattattctctacttttaaccttattcattttttttatatttctttcatcttcaattcctttgtacaatttttaatcctctttaatcacaaactctatttaataaatatcgtaataacattataattatctctattactgatccaatctccgaaacaaatttcagataataactttcagatatacccaaaactggtaactataagcgcacattttatttctctactaagaacccgccacagtttccttattgatttatgacaatctttcttatcatttgaagacgacgactgtattagcagtattggtaagattgatctgccagtttagtatattaatgttgagaactacttaatcttgaatattttttagtttttcaacttcttttcaaactatttcattcttttttggaatcaacgaaaaaaatgtcagttcctttatctactaaaattgcattaccaaacggtgaatcatatgaacaaccacttggtttatttattaataatgaaaatgttaaacctgtctcacaaggtgaaaaattaatttcatataatccatcaacaggtgaaccaattactgaagttcattgtgcaacagttgatgatgttaatattgcagttgatgcagcttatgatgcaatgaaaagttggaaacatgttgaaccaacagttcgtgttaatttacttattaaacttgcttcattagttgatgaacataaagatacactttcaatcgattgaagctttggattcaggtaaaccatttgaatcaaatgcatccgctgatgttcaatcagttgcagattatttaagatattgtgcaggttgggcagataaattacatggtactcaaatcccgcttaattcaaaatgtatggcaattacaaaacgtgttccattagttgttggttgtattattccatggaattatccactttcaatggcaagttggaaattttgtcctgctttagcagctggttgtacaattgttatgaaaagtagtgaaattactcctttatctttattatattttgcaaatttagctaaagaagcaggttttccacctggtgtatttaatgttttatcaggttatggtaaagatgttggttctgcattaagtaaacatcataaattagacaagattgcatttactggttcaactgcgacaggtcaaagagttatggcagatgcagcaaattcaaatttgaaaagtatttcattagaatgtggtggtaaatctccattacttgtctttgatgatgctgatttaattgaagctgctaaatgggctagttttggtgttatgtataatacaggtcaaaattgtactgcaaattcaagaattttagttgatgaaaaagttcatgataaatttgttgatattttcattaatcaattaaaggaagattggaaaatgggtgatgtctttaataaagatactagtatgggaccagttgtttctcaacaacaatatgatcgtgttcaaaattatattaaaatcggtgttgaagaaggtgcaactataattcaaccattaaaagatcaaacaccaaacgctggattttttatatctccaactgtttttactaatgttaaagaagatatgagaattgttaaggaagaaatttttggtccagttgttaccatttcaaaattcactgatgaaaaagatggtgttgctaaggcaaatgatactatttatggtttagctgcaatgttattttcaaccaactttgaacgtgctaaccgtgttgctgacttattagaagctggtagtgtttatattaatagttctaataatgaagatgttagagttccatttggtggtatgaagatgagtggtattggtagagagttaggtcaagaagcttttaacttatatacagttgttaagagtgtctaccataattatggttctagattataatttttctccctgtaatatcttatattattaaataatacaatctaatagttatgttgtacaaaaaacttcctaatcaggtaattttgaatttccacccacgacatcaaaaaaattaaaaattcatgaatcggattaattttttgttaattgttgtacctgtaataaataacatacctgtttacatatcaacctctttctttggacaagtatgttttttgccaagaaggaagaatcagaaccacctaaacgtggaaaacgtgaacaatgttgggcttcaagagatgcttattttgcatgtttagataaacatgatattattaacccattagatccaaaaaatgttaaaactgcaaagaaagaatgtggcagtgaagataaacaatttgaaaaagattgtattgcaagttgggttaaatattttaaggaaaaacgtccatttgatatcaaaaaggaacgtatgctcaaagaagcagcggaaaatggacaagaaattgttcaaatggaaggataccgtaaataagcaggacgtgcatatacaatgtatttattctctctattaatctttataaaaaatctgtacatataattcaatataagtaataaattaaaactacaataagaactacattgatcaatcttttttaagtgttctttgcttttcagcattttcaacaactttttcatcaacaaataaacccttactttttctaacattattcataactgttctaatccaattttctctatcaccatcagcacctaattcttcaatttcttcttcagttgttggaacccagaacggatcttgttcacaaacttcgaatccatcaaaaactaattgcggaattgcaccaccacttgtacgtttccttatatcctcactaaaaccaaatgatgttaagactggtaattttgcttgaactgtgaaaaatggtgtaccttccttcatttcttcacttaaaatattacctctttgtttctgaataactgtataaactttacctaaaagttcagcacttgtttgaatatcaactgtatacattgccaacatgatacgtggtgatgctttaagtaataaatcatgaatttgatctctaattttggtaagtatcatgtcgttttgagaattttctgattcagttgatgttatttctaaaatttcaactttaacattttgtataggctcattgataattggaccttccttaatagctaatgaaaatccactctttaagtaaccgtccaatgaattattacctgatgaattaataataacatcattatatttttcacttttcagtaatacatcatcgacagattcatctaatggtgaaagtttcattttaattgtatgatcaccaacaatgacatcttcacaaacagattcgagaatggtttctctaaatggaacaattggtttaccaactgtgaaatcaattttagcaaatctatcttttaaatctttaacacatctttccaaatgtaattcacctgcagtttcaagaacaacttcaccttgatcactaacataacctctgacacatggatctgctaaattcaataatttcataccatgtagtaattgattcatttgatttaatttaacaggttctaatgtgactctaacaattggtggaacatcattaattgaattagatgttgcaaaattaattgaatggttagatttaacaatttcaggtgagattattgtacctgatttaagaacaatatttttaaaatctgatgatctgataccaacaattgaacctgcagatatttgatccattgcagttaaatctcttcccataaatctgtataatttatctattgtaatttcatggacatgtggggtatttgattcatcatcataaggtttcggatgtgttatataatggagataacacatataaggtatcatttgtatgtatagtacctgaatagatacgagtaaatgcaattaatgcttctgtatcttcaggtaagtcttcctcttcttcttcctcttgttgatttactacaattggttcatcattcttcttcttcttcgtactcaaattcaagttcaaattcattatctgcatcagcatcttcttcttctttttctgcttctacatcatcttcaaattctaaacctggaacatcagagactgaaaaattagaatctaaatctaactttaattcatccatattaaaacgaatttctctctcttcttccttttcttctccattctcttccttagctttcattattatcaacatcgtcatttacctttttagctaatttagaagcagcttctgcttctgcagctctagctaattctgctgcctttgcagctttacctctttcatattcacctctatctctcataactgtttgattttcaggtaattcattcagtggaacagaaatcatttttgaaatataaccacataaaataccatcagcattacaatttattaaatctttatgaagagtttcatcaatttgatcagaatatgggatagaatctaatagtttatccattttattagcttgagcaataacaggtgaaggtaatttatcaataattgtggataaaatagcattagaaattggtaagaattgtgacattattgtacaagtaagtgatttaacatcttttgaatttaattcctttggagggactttaatattaagtgaggaagttatcttcgtaattgcatcgatatctctatcattgacagagttgtaaattttccaaattgaatctaaaataaaagcaatgaaaaggtttgatctctttgatttaacgacttttttatttttatcaatcatataatctgcaaataatttaccatctaattcagattttggaatacctaattttttagataatatagcagcaaattgattaagattaaacccccaaccatcataagcacttgtgaagaccacattatttgaatttggatggaaatatatatcatcttctgaagtttcaatccaaggttcatcaccattccaattagaatgagattcaataacatcaccattatagaaggatgccataatagtattagtttgatggattaatttatttaaatgatcataagcatcagaaggtgataattgtaattctaaaatcaatctatcgattttattaagtactaaaattggttttaaattatcaatccaagcttgtcttaaaactgtaattgtctgagagcaaataccttcaacaacatcaactaagactattgcaccatctgataatcttgaaactgatgaaacttctgaactaaaatcaatatgaccaggtgaatcaattaaattaatgaaatactctgaaatttgaccttgttgattaattgatttgaaggataatgaaatagcagatgattccattgtaatacctcttaattgttcatcaggtcttgaatctaagtatcgtaccttacctgccattttctttgaaataataccatttgaagcgattaaagaatctgaaagggttgttttaccatgatcgacatgagctaaaatacagatatttctagtatttgactgcattatttacctgtgagtgtatatagtaaacaatatacaaaagagatctagtatacaatatattaacataaaaattttcattcatttcttttcctgtcttataaaagctgcatttgacagtgaaaatattctaccactatcttccatgtgtggcgcagtcgaggaccctctggtatgggaggcgctgtggctggtgtctctgtctctctctttatcaaaacctgttattatattacctccgccctgtaggtatacctgtctctagtttatgaatccgatcatccagtgcatgaagttcatcctctagtgattcttgtttagcggcattagcctttagctgacgtactagttgcttttactttatctgattccattgctaaaagaaagtagtgtaagtaattgctgtaagaatttcaacgcgaataaccaactatattttaaagaaaacaactctttcaacatgttttttagtattttattttcattatatgtttcatcttcttgtagataactaacgatgtccgtagtgatagatctcaattcaagtgctgttcatgcaggctttctcatttaaggaatctccatgatgtttcaataaatcctgtttattataataatgatgatccaatatttgatccaattccttacatcttcgacaactactgaaccttatactatttttcaatgatggtatactatataatgcatcaattacacctgcatttatacgtcatatttattctcaacttaatgtatcagatgaatcactaccattagtaatggcacaaaatgcttggtttgatcgtaaacaattgtcaaaattatcagaaattgtatttgaagatcttgaagtaccaatttttcaaattcatgaaaggacaactatgtacagcttatgcattagctaaacctgatgtttgtcttgttgttgatattgattcagattatgcatcttcaactccaattgtttcaggtaaagttattcgtcgaagtattacaagatctcattatgcaggtgatttcttagggtgcatgtgcctcaaaacttttaaatttagataatgatgaaaatgtaaattactcaactgcatattcaaaatcacaggaaatgtcagatattattcatgcagctttagatacttctgataatgattatgttactttgaagggtaaaaatttttcacattcatttacaagagatgttattaataaatcattattagaaccattatttagacctcattcatcttcattaggcgttccacaggatgctttaggtttaggtcaattagtacttaaatcattacaaaatacaaatactgcacctgctgcattattatcatcacttgtggttcaaggtccatatgcatcagcaccttcattagaggatgcattattatcagatattagattatatgttaaagatcatcaattagcagcttatagatcaactgatgcaggttgaaagaataactacaccttggatgggtgcaaatattttatcacaatttaaagatcttaatgttactaaacaaatgtatagtgaagatccagaaatctttgcacgtagaatatttggatgatgcagtggtattttatgacatgtttactattatgtgtattttgtgtattagagcttaaagattgggtagctgtctgtattattgttctatgttacggggtacgaatatagaaactgtcgtctattatgaacatataacacaagtatacacttatttatatgcttttgtaaatacttgtttaaacgtcttaaattaattaaaagttacaaaagtatcatttataattagataaaaaattattatcagagacaactgcacacgtcaaagatttagagattagagctgtgaaagaggaagaaaagtttcgattttgcaaagtatttcaatctcagatattaaagaattaaagaattttaaatcagtttccaaatttgcaagaaattgattgatgaagttagatcttacgccattgaaaaatcattaatcgcttttattaagcaacatttcttgcaaacgtacaaacaaatccctatgtgtgctcatttacatcattctattgaagttttgttaattgattctttcatcaaattttattcatttttagactgttccaaacgttgttatgcctgaaaggactgaagtcaatgctttgcaaactaatttccgttctcgtttcaaccatgaaaagaaacgtttaacatttaaatcggaatgattattatttgaagaaaggtaaaacatccttttcaaagaacgaaaaatccattgatattaatgttgatttaaacggttgtactgaattagttttcttagacagtagtccatatctttctcgagcagatctgcaacagctatttcctccctaacaagctctaatctcgcaatcttcaacttgagcagttgtcctataagagtaacagttgtagcttttaatgtaataattccattaatgacattccgcttcttcaatattttcttttctcccagtttagacataagaaatagttttcaaagtcgcgtctaattccttatataagttgctataataatgacgtcctattctccgaatatgctacttcaaaattgtttaaaatattatgtaatataatgtatctaaaatgtaataaaggttaattgttcttagataaagtaaaggaactaaacaattataaagataacaatatgaatatcagaagataactgtagttattcataaaaatatggggaattactttaaagtcgattggactataaaatctctcattttaccatatcacattgcttagccgccaaaatctcactgagtcaaaaaaaattgaaattttgaaattttgaaagatcttcaatttttaacatggaaacttctcttatagatttctctaatgttcaacaagaccagaataatggcagaatctattaaaactaccaagaaggccttatctacagctacctcaaatgcacctgcttttactcttaaaaccccaaagggtaccaaagattgggcagataaagatatgactgttcgttcagcaattttcgatcatttaacttcattatttaaatctcatggtggtgttacaattgatacaccagttttcgaattaagagaaattttatctggtaaatatggtgaagattctaaattaatttataatttagaagatcaaggtggtgaattaacttcattacgttatgatttaacagttccatttgcaagatttgttgcaatgaatggtatttcaaatattaaacgttatcatattgctaaagtttatagaagagatcaacctgctatgactaagggtagaatgagagaattttatcaatgtgattttgatattgcaggtgtttatgattcaatggtacctgatgcagaaattttgaaaattttaacttcaggtttattaggtttaggtattgataactttaaaattaaattaaatcatagaaaaattctagatggtattttccaagtttgtggtgttactgacgatgatgtgcgtaaagtttcatcagctgttgataaattagataaattaccttgggatgatgttaaaaaggaaatggttgttgaaaaaaatcaacctgaagaagttgctgataaaattggtacttttgttaaaattaatggtacagttcaagatgttttatcaaaattaaaatcttttgatgaattaatgaataatgaatctgctaaaactggtattgaagaaattgaaacaatgacagaatatcttgaagcttttaaaattgatcaatttatttcatttgatatgtcattagctcgtggtttagattattatactggtgttatctacgaagctgttactgaacaatcagctccaccaactgatgcagcagagaaaaaattaaaatcaaagaagaaaaataataatgatgatgcatctgaatatgttggtgttggttcaattgctgctggtggtcgttatgataatttagttggtatgttccttggtacaaactcaaagggtaaaaaggcaccttcaattccttgtgttggtgtatcatttggtattgaaagattattttcacttattaaacaacgtcaagctcatttagataaaattagaccaacttcaactcaagtttatataatggctttcggtggtggtgatggttggaccggtttcttacctgagcgtatgcaagttgcaggtatgttatgggatgcaggtattgaatctgaatatttatataaaaagaaggctaacccacgtaaacaattcgatgcagctgaaaaatcaggttgtccaattgcagttattttaggtaaagaagaattccctaatggcgatgttagagttaaagtgttaggtcaaggtgatgataatgaaggtgaattaataaaattagaaaatatggttgaatatgtttctaaaaaattacaagaagtcaaagttgatggattgtcagatgttgaaagattacttcaagctaaataattgtaaatataataatgatgtataaagtagaaactttaatgcaatataataataataataataatataatataagttttaatataaactaatacagaacgttttataaatcacctgcaatatcaacttcaaaaccaaatttaccaggtttatcagaatctaatgattgtttccatgataatcttgcagaattttcacccttattgtaaactaaaccaacatctaatccatgtttccaatcatttaaatttttcaattcaccaattttactaatttcattacttgttgtacatccattaatactataataaagtctaattggattattaatatcgattaaacccgcctttgtataaactccaaaattataacttaaaaatgatcctgcaccaacagattttaatggcataattggagtttcattacctgaaacaattggataaaatttatcttgaaaatgaattgtaccaccatttaatgcattaaaattaagaatatttccaaatttaaaattacttgaaaatgttaaaccattaccaaggaatgatttaacataatccaaattaacattcaatttatagaattgatcttcagaatgtgatgatgcatcaattaatgatgcaatacctgatacttcattattaacaccaactgagaaaccattcattggtaatttgaaacctgaacttgttaaaaatttcatattagttgataagatatttaagaaaattgaatttttcaaactttcacctgcatatattttaacttcatcatttgcactatcgtcaacatcgtgtatatttctgttaactatattaaaaccagctgttaaagttgctaatgcacctgaatgcttacaatactttttgtttaattaaaccaaattgtaaacttgaagaattttgatttgcagattgataaattgtatcatttgttttaatactattaaaatcaccaaataatcttaatgatgtattgattgttggttttgaaaaataaatatttaaattttgtgataatgttcggaaattatacattgaattaattgtaagattttcaccactaccaaatacattattatttgaatatgatgcattaatatagttatatgcatcattgtgaacatttttaattcttatattagattttggtaatggatgtaaatgaattgtaccagttatattagttaacgcattattaaattcatcaaattttggttttgattcagtatctaaatcaaatagtaatttaacatctctaaaattacctaaaaatcttaattgttgcattactttattaccgtccttaactaaatcaccaattgattgtgttgatgattgtaataatggtgaaatgacattttcaataaattttggattgaatccatctgcaccttcaacggttaatttttctaatgatattggagtagtatcaatatcaatggagttcatcttacctatagtatagtctactttaaaagtatatggcacagttaatagattaccaaaatgagccattatgcaagcattgaaatagttgattttttttcatggtagtgcgaacagccaatgaaagtggcagatgggttggatcattctacaacttttcacttagagtgtctctttctataaaggatataaaaatgtaattatactaaataatttagatatagtatttgtattgtgaatttttttgaacagatttaagtactttagaattgtaaattggttcgaaaacttgtttattgtgatgaacgtgatgtgggaagtacccaacttcaacaggtttttgataataactatgaccaacagggaagtattgatagcttgaaccactatcttgtacctgtactcgatcttttgatattgttaaattagttatactatcatttgttgaatctttattatcttcaatatccacagatacttcttcaatttgtgtaatcagttggtgcatcatctactgtttctgatttatttctctttctattgttcattttcttttcatttatgaacattttacttattaaaacatctcccttattcgcataaaaacttggatttctaccacgtacaataacaggatgggattcaagtaataaattgatgttctctgtatttgaaaaatttgttaattctacctcaactataactgtataaaatttagatattgcatcatatctattattagcagttgctgatttaaacttgagttgatcccaagtaaatgataagatattagaattttgagatttagtttgcgattcctttaattcatcaaatgtaaacgatgattcagttttattcaaaacagtacgtctcttatttgatgatacagtttctgcaaacatgaattcctctctttttgttaatgttataaattgacaattttcatcattaattttatgtttccttagactgttggaaagtttcaatcttagtatggaatctgatgttaattgtgttttacttatatcaatatcaatatgaacagatataccatttcttctataacaagcgagttgtttaagattggattcatcctttaataattcaggatttgtatataatcttccactaagatttgcagaaatattgatatctagattatctaattgtgcttttgcaacaggttcaagtttcaagagatctaaaacctttgatgtaaattcagggtttattccattatcgggtggagtatcttctttacttttagattccccataattattagtttcctctgtatttttattataattattattacttttctctggactcatagatgaaaagttaacttgtggtctgtttgaaccagttcgaaaagatagtatatcgtttgaatcaacatttgaatcaacatttgaatcgaacaattcaatattattaggatcttcaaaatagttaaaatctaatagattagatgatgaaaaagttgtttctaatggcaaatatctagcatagcttgcagcacctattattgatattgattgatcttcaaaactacattgactcattatatctatatctgtcattgatggtatacttctgagatttttagggtcattattagtatcagtatttgtggtagtatgattattaccttcgttatttgtgttatgaagttcttgcagaaacaaggaagcaaactcgtcgtctatgttatttctatatttcatggtaagcttatcgatcttggttagtaaagattaggagaaaagataaaagaatagttgaaaaatgtggagaaaaaaaaattcggaacttcctctctttttatacattttttttataaagttgaatattttttgggtttataattgattaattagtttacaatgtgttgatcttatagtaatagtttacaaagaataattatatattatataaggttccttttctcattaattaaagctgaaattgctgctccataaatactgctatcttctataaaatccaatgaaatattcggagtttcctctaataaagatttctcaattagtacttcggttacagcttttttataacctggaaaatgatttaacatggaaccaacaacggaaatatctaattcatttaaggaattaaactttccgatattgactaatgaaataatatatgaaactaaaataattgaagcacgataaataacaaactccgttatttttttcaaaattattaattcttcttcaattaaatcgaatccaacatttttaccttgatttaagagtgacagttgatgggcagttaatgaatattcagtatttgggaaatttctttcgaataatgattttttgttgtcattaaaatttataaatattcgacgaataatttcgggtatatatcttcctgatgttagcaactctaatggttgaaaaacaccataatgggaggttgttaaatgaggtggtaaaattgaattatcattgtcaataattgaccatatacctgaaatttcatgatcacttgcagacaaataatctttcaaatgcattccaagaaatgatgcttcagtattgacaagtaatttatcatttaaagcatatgatttgggtaattttgattttttctcatttgaaaataatttagaatctataagcatacaagaatttacaccagtaccttgaactaaacctaatttagaacttttaaaataagcacctgaaataaaaactgatattgaatcattaacaattgtataaatttttattggtatgttattggaagcaaagcaattttcaaaaatatcctttagatcaccagatttaaattcatcacaaactgaaaaacctttacctaaatctgatactatacctctattgggagcaatattttgaattattgggaaactccaagttagaccaatttttattttattatcattatctgataacttttcaatcaattgattatcaataacagatttaaaattagttgcaatccagttgaaaaaatgtatattaaatactttattatcattgttaatattccaagatttatttataatacattgagcctttttattaggtaaaaactcaacaacactaattcttagagttgaaccaccaatatcaataactgttacaaaacctaataattgttcattttcatttggtgggatacttaaacacggtagcatacaattgtttgatttatatattgagtcaaatatttgactttcaaaaatttcagttatcttttcaaaattatcattgatttgattgattttaagataattaagtaatttttgttcaataacattatgggtatcaaaatttaaagttgaatctgatgaactatctgtatcagttgttaaactttcagttgaaatggcaacagaatctgatttatcagttgtataagtattttctaatgataattctggggtacctatattcatttataatattgatagtttgttaaatgtgaaaaacagaaaaaaggaagatacaataaagattgaataaagtatattaatgaatttaatatcacctgctatatttgtttggataagcgggagtatttgtttagttaatggattaatagattaatagattaatagattaatagattaatagatgaaagaatgaaaggatgaaaacaatacgaatatggagattattgatctgtttaagaatctagaaaatgatcaagtgtttagagttccaatatgtgaaataaaacatcacattaactttcacttccaatactgtgatataaagaagttaattaaatgataataaatttgcaactgttcaattatgtgttacaaattaataaagatggattaaatttcaaattcagtaaatgttgcaatcaagttgaaacatctccacaaaaataaatcaaaattgtaacacaagatgaattcataaatattttggagaaaaacaaaaaaaccgcgaagtccgcgaatttataattctttttttttttgttttgggttttggttttccgtctctcaattaagtctctctcttatcattcaaattgtacttgccgtgtgtgtggtgagatttttttagtattgtgtaaagagtgggaaatacgacagttttactgtttttttttttttttgaaattattttatataagtagtgaattaataattgtattgtaatcattgtagagacaatcagagataacatcacaatgaaaagatcaccctctatggatatgtttcgaggctttaatattattcaaatggaaattgctgaaacatttgatgatttagatcatgcaaaatataatgaaatgaaattaaattgggcagatacaattttcccctgtttctcatttataagtggtatgttattaaagcaagataaaataataccaataaataaaaatattcaattaattggccttggtatgacattcaatttaattccaacaattttagaaaataaaaaatttagacctttaggtgtattacagagacatggattaagctcaattctattaaataatttaataccaccaagttatcgaaataatataattttcccaattgcattaacaacaatttggtcattaatttcaaaatatttagcaaataataccgataaaccttttgaaaatgaaatttatactgcacaacaaaaaattgattcaattttctttaaaggacgtcaatatcatgataattttgatcctgaaggtttattaggggcattaatgacaactgttacaatttggttaggttcatggtttatatcacaaaattttaattataaaataattccatttataggtttttcattcattctatttggtagattattgtccaatgcatttcctaatatgtatccagtttcaaaaccactatggacaccatcatttacattacaaactacaggttatagtatattgaattattgtatatcgaattggttatgtttaatattaccaacttcaatatcaaattcaattcaattaatgggacaatattccttagaaaattatttctttggagaattattattagttggactaaaggaatcatatgttacatcatctggagtgacattatgggatagaattaaatcattttttaaatttaagttcccattcacaaatattgatatgagtccatatattatgacaagtattttcaatgttgtattattaggttttacacatttatgtcattggagtcatttcaagataagacttttctaatctaatttagtatatacccgtttcctttaattatagcttaataacttataacttaatatcttccgagataaaatcaacccatattatataacttccgtcggtatgcgtgtgggggaaataaaaccgttggtattagattaaaattgctacacaagaaatactcggagatttgttatgttacaatttctccttctgccctcctcgtaagatccttatcgctaatcttttcccgctctatgggctttattatagtgaaaatatttttaagtaaggtgtttgattcaagcagtgtttttgagtttcatttcacaaagttcattaaaatctggggattcttatcgcagattgtagcataggatatgtgttacaatatactatacctttttctttttgttcgaacatctatttccattataaaagaacacttacttcatcttactgtcacttgactttaaacattcactcaatagagtcacatacttattattaatctatttttattttatatattattgaaaaatatatatattttaaacagaagataaaccaaactaaactataaacactctctaaaatatgtcagatagtagtttagcaaaagataaatctcaaattgatgaatttgaacttgaggttgcaaatcatgatttacaaaatttattaaccgttgaaaaggaaattggtgtccttgaagcaataaaattatatcctaaggaagtcttttggtgtggtgtcttttgtttaggtgttgtcatggcaggttatgatggtcaaattatttcagctttctatggtttaccagctttccaaaaaagatttggtgttcaattagatgatggtacttatcaaattactgcaccttggcaaactgctttaggtatgggttctccaatcggtcaaattattggtactttatgtgttgcttggccacttgaatggtatggtagaaaaattacttatgcttttgttaatgttggttgtattggtttaatctttatgcaattttttgctccttcattaggtgttttaactgctggtgaaatcttagctggtatcttatggggttgtttagtcctaattggtcctttatatgcttctgaagttgctcaaattaaattaagaggtattttaactgcaatgactaatttaagttttgttatcggtcaatttgttgctaatggtgtctctgatggattttcaactaattcaactgaatgggcttataaagttccttttgcaattcaatgggcttggcctttaatcattcttgcaatgttaccttttgctccagaatccccttattggttagttcgtcatcaaaaaattgatgaagctagaaaggcaattagacaaattgcttcaaaatcagtctctgatgaaattattgaaaaaagattacaaattgttattgacacagatagattagaacaagaaatggaacaaaccacatcatataaagatatctttaaaggttccaatttaagaagaactgaaatttgtacagtcgtttatgtcgttcaagttatgtgtggtgtcccatttgcaatgaattattcaacttatttttttgagttagctggtttcaacccaaatagggcgtttgatttatcccttggatcaactgctattggcttttctgcaacttgtttcaccggtctctctcttacatatatcggtagacgtccattatatctttggggtttaggttttacaactactttattatggattattggtttcttagatattcccaaaaactatttatctagacctgctctatcaaatacccaagctgcattgatgttgatctggtcatttggttatcaattaacggctggtcctttgtgttttgttttaaatggtgaaattccttcaactaaattaagatctaaaactattgcttttgccacagctgttcaagcaatgttttttattgctgcaactgttgctttaccatatatgcttaatccagaaaatggtaatttacgtggtaaaacaggttttgtttttggtgcattctcattattatgtttcatttggagtttctttagattaccagaaactaaaaatagaagttttgaagaattggatattttattccataaaagagtcccaactaggcaatttgctacttatgatgttacctcagatttacaaattactggtttaccagatgaagaaaaatccaatgttgttgaggaaaactcttccctataattcttttttttttttgaaatacagtgtttttatgataatttactgtcttttcaatttttccctatatattactactttctacagtacttgtataatgttttacaattatcgaataatttctaaccaataaaaccccgttcaaaaaaaataataaacaaaaccctaagtttaatgcttcccaagaattcctccccacaaaaatgtaactttccttatgaaatttctcgtttgctcttatcggacttttatgtaacaatttcaacttgaacaaaaataatattgtaacacaaaacaataattaacttttaccctttaaatattaactatatggccagttagatcatataatcaacaatactgcaattatgttgaaaatactactttttgaaaattaagttttatttcaataaagcataaataatataatggttgagccagtcaaattcgaaactaaaaacgaagctgctaaatacgttgctttatacattgcaaattctataaatctcttccaaccaactgaaaaaaaaccatatgttttgggtttaccaacaggatcatcccctgaaccagtttatgcagaattaatcaatttatataagaaaagattagtgtcgtttaaaaatgttgttaccttcaatatggatgaatattgtgaaattgaaccaacaaatgatcaatcatacgattatttcatgcataaaaacttttttgaccatgttgatttacaacctcaaaatattaatattttaaatagtttggctgaagattatgaaaaagaatgtgcagattatgaagcaaaaattgataaatatggtaaatttaaccttttcatgggtggtttaggtccaaagggtcatattgcattcaatgaatcaggatctccaagagattcaaaaactcgtgtagttaatttagatgaatcaactattattgctaattctagattttttggtaatgatacttctaaagttccaacaaaagctttgagtgttggtatttcaacaattattgataattcaaatgaactcctctttttagttttcggtgaaacaaaaagagaaattttacataaaactcttacttctgaaatttgttccggtattccaagcacttatttaagagaacataaaaattgtatggttgtatttgatagtgaagctgctggaaattaaattgtaatttttaattaaatctagagacatttatataaataaaaaacatttaatcaactgtaattactgaataataattataatattggttaacaatttcaaatccattatcttggagactttttatttgtttatcctctatatcggttaggaagcattgagaacaattattatattgacctttaacatacattaatgcagtacatattaaacctaatttgaaaacttctgataatgtattatataatggatcaatgaaagtacccgtaatacatgcataatctttactgttaacatcatcatttgaacctttcatttgatctaagaatgggtagaatttagaaaatttggatttattattgaaaacaacaacacttccaacgattgatttctttgtaggttctaaagcaacaattatatctagattcccagattgatccaaatattgattttcgcagtctgtaagtaaatcattgcataattcagcataaatacaaccactattattattcttcatatcttcaaaattcttatttaattgaattgtcagtatttcaataggatttttgcaaatgtcaaacattattccaacaacttgtagttgtctaactaaattctctgcaactttccagttcgatatatcatctaatctcatcaagttacatattttttttttcgatgtcatattcaacatattgttaatatcaacttcatcccaagatgactttgttttatcacttacatttgttatatgttgtttatcaactgttgatattaatttatttatgcttattctatccatgctcgaattcattatattaccaaatgaacgttttcttctgttcgaggataatacattgagtttgtgttgataagaatccaaactaaaatcccatccaaatgatttaaaaaaattcaaaacttgttgattgctgtctgtgttattgaaaactaaatcattctttattgataacttaggaaaattatttcctaaatatattttagagcatttacaatcattgaataaatatttcatagttttggaatataaatatgttccaattgcaatatttctcttgtttttatcaactaataatagcacaatattcccaatattattcttctgacttttggggctataaacccacacagttgaaatacccaaaatgattttcgaacttgtattccttataacaaaactatgatgattattaccatcagaataaagtcttttcagactatttaatgaatactcttgtaaattttgatctaaatatccattatttttcaaaagttgaatcatattctcaaaatcacgattaaagttaaatgattccacaagccaacttgtcgatattgatttatttcgatcattggatttattttcaactttattatcaacattatttagccctggtattctaccaaccgccttaaaatcaccaaataggatctttggtaagttacagagggcattaattgtatagtcataagtacaaatataaccagttggtgaaccacctatattaatgtcatacagaaaatccgtgggtgatgaaacacttataataatcatttgtctgttagttattccattctttttagattttaatgaatttgagttacataacattgaaacatgtttagaaactccaacttggtataaattattagttgtttctgcagtgaaaaacaacaaaactttagatttgagaattaattcttcatgaaatgatgttaaaccattagagttataacttgtatgataaaaattataaccaggtttatactctgctagcatcttacctaattccataaaaacatcctctccataatttagtttaccttttagtttagattctgaatttaaattattaatatgtgatttattaccttgtacatcaacagtttcatataatggagcaattagaggagttaacaaaagtactgtattatcattttccacaaatggtgttaaattattcgttattggtaagcctgagtctcttataacagttattgatttttcatatgctctatttgatagtaatctatgttgaaataatacatcatttgaaagaaaattggtttcattcaatacttcattccataaaggtaatttactctgtaacttttttattctttcaagacttttgataattttattttgatcaattaattgatccttaatgactgattttaaagcatttattgcttgttgttgaatttcaaaattactacataacataattaaatcacaaccaacagaaaatgccgatatacatccttgaacaacaccaaaatttttatccaatgcttccagtaataaacattcacttattacaacaccatcaaatgcaacttttccacgtaaaaggtcagtaacaattgttggacttaaacatgcatgtaaatcatttggattaaccgtcggcactgcacaaccacctacaagtacactatcaagtaaattatctttagttaattcaatatacggtaccatgttaaatttaattaattgatccgttgattcagatatcattggtaattcaaaattagaatttatagtagcagatccgtaacctgggaagtgtttaccacaattaatcatattctcatctttgaaagctctagctgcagctcgagaaaattttaatacagtttctaaattatatccataagatctaacaccaatcatttgatgtataaaagaatttgcagtatttttcaaaatatctaaaactggacctaaatacattgaaaatccaatagcttttaattctttagctatagcacgataaacttgataaactatctcttctgaattagttgcacttaaagtcattgcaccgggaaattgtgttatatattccttatcaaataatgaatttaacattccaccttcttcatcaataacaaatattattggatgttcataatttgattccattgctattgtttgtaaatcttgtataagtttctttgcctgtgatgcattagtaaaatttttgccacttaatattatgaatcctatattatatttcgttatcagtaagtgtaatttcttccgttacgtcgataccatcaaatcctacaaggaaaaacttcccgacttgattcattagataagatgaattcaaattatcagtcattctaatgattcgaaacttagatatcagatcctattactaaaaaactatttattttatgtctagaaaaggaaattaaacctcctccaaagtaaccccaaattcatgtcactcacatgaaattccccagaaaagaagtgtaaagtggaaaaacttagaaatattattttccaactggaaaaatgcaacacaagataaacgttaatcaagcggagaaattccccgggggtgcgattgcaacattacgaaaaggccgattatcgacactcgggtgtacttttcagtttggtattcatataatgagtgtggcattattgcaacattataaatgaagactgtaacagccaggaatatgatgaatatgttgagcaggtgatacatttttaaaatagttttgagatgaaataaccactatcaacaatcaaatttttaataaaaaaatcatttatcttaactaaaagaagcaaaaaagctaggtatactctaataattaatgataggtataatacattttaccaactgctatttagcagataactctcagcttgtgaaaaaagatttgtacatagatacaaaacaaggtataatcatagatggaagtagtatagagaaagaaaataatgaatgtaaagaaggaaaccaaagtgaagctaaagtagaagttattgatttagacggtaatttaatatcaccagggttcattgatattcaaataaatggatgttttgggcttgactattcaacaacttttgaagattctcaaagtaaagctaattttgtattgcattatactgaaagcatggaaaaattattaaatcatggagttacaagtgtttgtccaactgttacatcaagtttttcaaatgtttataatgatgtaatgatgataattggtttgaaaactagatcatcaactaaaactgattcacttggtgctcaccttgaaggacctttcatttcaccactcaagaaaggatgtcatccacctgaaactttaacgactatggaaaatggttatcaatcattaatagatatttatggtgaagaatttgaaaaatatactgcaattcttacagctgcaccagaagtcgacaactgcttagaagtgataccggaaataactaaagataataaaattgctttctcaattggacatacaatgtcagattttgaaactggtttacaatcaataaaaaatggtgcaagtatgattacacatttatataatgcaatgccaagtttaaatgctagaaatcctggtgttattggattaactaatacaacacaagatattttaccttctgaaaaaataccatattatggactagttagtgatggaattcatgttcatccaacaaatattaaatcatcatattttgcaaatcctggtaaaactatattagtcactgatgcaatgtatttaattggattagaagatggtatttataaacgtggtaatcaagaaattgagaaaaatggcaatttattacatttaaaagataccaaaacaattgcaggttctgcaactcatttaattgactgtgttaataatttaattaaatggaccggtatatcaattgaaaaagcattagctactgttactaataatcctgctatgtcattgaatatttctaaaagaaaagggtttttaaaaactggttgtgatgcagatttagtcattttaacaccacaaggtgaaattaaacaagtgtataaacttggtaatagaattgtatagaattatttaaaaagttattttatctaaattagtgttaactactgtttattttgctgttttattgattttttattttttttaacatttcatatataatttttttggtatcaaacttttttgcattttttcatatttttcaaaaaaatagttttaaattttgaagattttaccgttttctttgttgcacacatattactgatgttataatactccataactagcataaaaaaggtaaaaacctttatattcgttgtttgaagttaattcaacaaaactacccaaaatatcacgtgaccttattttaaaaactcaaatatttaaaaaatttgaaacgatgtcccttcggggacatatggtcaaacgaaaaaatacagagaagattagcatggcccctgcataaggatgacacgctttacaaagagatcttactcaacttttttttttcaatcaattacattctatgtaaagattgtttgggactgtctaatatgtacaatcaagtgtttttggtgaaaaagggggttaaaacatgaatgaatttcaaaaatgggaaactttccaatcatgttttcgaattttgaattctaagaaattggaactttttttcatcatactgtaattaattgaactataagttattttaattatatcaatataaacaggggaaattacacaaattaatattaaacaaatttaatcagtttcttgaactgaagcagttgattcatttaagagtgaagtaatatttgcaggtggataaattgcagttaataacataattaattcataaatttcagctgggacagatttttgataaatatctaaaattgcagttggatcaggataaactgataaagctctataaaaacgaattgctgcatcaatttctttaccaacaattgcacttaatttttcagctaaagtaacttcttctatgaaagtttgttccttatttgatgtagataaaggttcagataataaagattcaactaatttcttctttaaaacttcagttttttccttctttgaaatttcattctttaatttttcttccttttcagcttgtcttttctttaagtaaattgattttctaaattcagcattatttcttctttgataatcaaagtaaagacaataaccgactgcacctgcagctaatgaaagaaaagtaacggtagctggatttgccatttttatatgtttctaaatatgctactctagtgtaggaaagaacttcaagaaaaaggaatagaggatcaggactacttgaaaggcacataataatgttgaacaaattaataggtgaagaaaaaatgccgaaatttgtgaaaaggggaagagtgagtgataatttattataggatggtgtacagatgaaagtggggtttaatgttgattatggaggtatttacatggttataatggggatatacaggtatactagtagtataaatatatgattagggaatttcatatgagtttgactgatatggagtagtcttgtgttgattgaaagaaagaaattaatgtgaaaagatgtaatatgcatgaatttcataaattttttttgatctgaaatagatcttcaaaatatttttttttatcttgaactggttctgaaacttttgatttaacagggaaattttgacatatttagggtatatatacacttaaaaaatggcagttaagaaaagatcaacattaagaaataaaagtagtaaaaaaattgggaatattacaaagaaaagtgttgaagaaatcaccaagaatgataaaataattgataaaattgcagaaaaagttgagaaaagtattgaagataataaaactacaaaatttaagattaaaagtaatagtataataagtagtacgataagtaccgatcctaatcaagttggtataagtaaaagtgcaattagaagaaggaaaagaaaattacgtgatcaattaagacctaaattaacagaagatttattagatgcattaactgagagtacgaatacagttattaataagggagaagatggtaaggaagaaattataattgaagaaaaggttaaattaaatcatttaccaaatccattaaataaaagaggagaaatggcattattcaagattgagaatgaacaatttaaacaagttttgaaaaataaagatttaagaactggtggattaagtgcattaaggaaactcaattttaagtaatttaaatacagaatgaatgaatattttaaatttagaattttttttgtaacattatttatttatttataaaagtaataaataaaaagggaagatttatgaataaagtaaaaaaaaatgaaataaatataaaagtaatagttttaactaagtaaaatagaataataatgatgttaataaataataaacaaatataattgaataattgaattaataaattaataagatctataccacattctaccagttgtatcactcatcattttcttttgtaattggaagataccatataataaagcttcacaagaaggaggacaacctgggacataaatatcaacaggaataactctatcaacacctctaacaacatgcataagaataatgataataaccaccaccatttgcacatgaacccatagagataacccatcttggataagccatttgatcataaaccattcttaaagcaggagccattttatttgtaacagtaccagcaactataataatatctgattgtcttggtgaagctctgaaaataatacctaatctatcttgatcatatcttggagctgaagcgtgcatcatttcaacggcacaacaagctaaaccgaaagttgcaggccaaaatgatgattttctagcccaatcttttgctttatctaatgaagtaattgcataatccataacatttgataaaggtctttcacttaaaactggagtatcagttggtaaagtatttggtgtaagacttccagagcgtatatttgatatagagaatgatctaattgaattctttaaaattgaatttgaaattgaaactgtatttgatttaaatactaaagattttgatatttgatttaacattttatgaattttatatgtatgtatagatgtttttatgtatgattgttaatatgttattaataaatatagtaataatggaatgtgtgtataatatgatattatttatgattgtatttcttaatgaatatattaaagtttataattataataaatgaattacagacagattgatgaacaatagtaaataatataattgaaataggatataagtaagatctttactagtaacagttaacgatacctgtaagggaaaacttcaaatgaaagtatcaaagatgaattgagagacgtttgaattcaaatttaataataattgtgtaattggagcgattctgttggttggaaaagtttttgtatttttcatagtagtaattgagtaattgaggggaattgggaattaaaataggagaaattataaaattacgtaatattcaaaagacgcgtctattattaaattaaactatatgtcacgtgacacagacgcgactattaaagaaggctcatttttattattaattaattaattaattaattagggctcagttgatctgaattattattaatagcaactttactcctttgtcgtttgctcatctttgtccttcttcctattgtctacattcttccttcataaaccggacatcaccttatttgagagaatggaaatacaggtagtaaataagttgttgtagtaatgtatatttgaaatttagaaataggtctagtctattgatgaaaaatttatagtactaacgaattaatataaggcagtgaattgataagttaaaacctacaagaaaagataaaatttattatgaatatttcaagatactctagaacagattttatcatatagtgcccaatcatgaatcaatagaggttcaaaaggatccttaaaagtaaatatattaataaatcaaactgacaccaaaacaaaaccagccatcgggtaatcctcaaaactgccaaaaaagaacgaaaaattactaggggaaattttctatttttgctatcaaaagaaaaaatattctattgtttgtttacaatttgattttactttttttccttttaccacagccacctttcaaaggagagataattttttatcgtattgtgtgcatgtgtttcacccctgaattcaaatttctattttcatttaaatactcttgaatttctgctttgatctgctattcttccaaaatgctattttcactcttatttttgctactttcttaaaagtttcgttccttaccctttatttccttcactttttttacatcaatagataataatgaacttatcattaatatacttattttctcttatcacattcactttatcttctccaataaaacttcaaaaaagaaactctcgttgggattacagttcagatgatatttatggtgttaatattggtggttggttagtccttgaaccgtatattactccttcattatttgaagctttcggtggtgaagattcaacaaaacctgtagatgaatatcattttactcaatattatggtaaagataatgctgaaaaagttttacaaaatcactggtcaacttttatgactgaagatgatttcgaattaatgtctcaatatggtttaaattttgttagaattccaataggttattgggcttttgaattattagataatgatccttatgttcaaggtcaagttgagtatttaaataaagctcttaactggtgtgcaaagtataatttaaaagcttggattgatttacatggtgttccaggttctcaaaatggtttcgataattcaggtttaagagatactttaacttggcaaaatgatcaaaaaaatattgatgtaactgtatccgttttgaaaacaatcgctgaaaattattctactgacgaatacaaagatgttgttatcggtattgaattagttaatgaaccaattggccatgatcttgatgaaaccaaattagaagattattataatcaaggttatgatattattagagaaaatggtgatgttcctgttattattcatgatgccttctatcaattagatcatcattgggataatatactcaatactcaaattgacccaaatatttgggatgttatcgttgatcatcatcattatcaaattttctcagttgatgaattaaaaagagatattgatgatcatgttaaagttgcttgtaatttaggttggcaagaagcaaatgaataccactataacgttgtcggtgaatggactgctgctttaactgattgtgcaaagtggttaaacggtgttaatagaggtgcaagatgggatgcaacttttcaaaatgattatgcaattggtacttgtgatcatttatttactgcagattattcatatttccaagatgaaagtgtcagatcaatgtatagaaaatatgttgaagctcaaatggatgcttacactcattcaaaagtcatgggttggatattctggtgttggaaaactgaaaatttaattgaatgggacttcaaacaattagtttcacttaatattatacctcaaccattaacttcaagagaatattataatcaatgtggttatgttacttattgatttagtgtttttccattaacaagttttcattttcgttttcattttcattggctggttttctttggttttttcatttattttactaacattacttttctctttcttttgctctctctcgttatatattagactaatttgcattacattcattctttgtatatcctactacatgtgtatcattcatttataaaacaaacaaacaaaaacatttgtacagtataaaatgaaagtttcatagcaaaaaagttgatttcacactatcaacataaaatttctgattttcaaattttcttattgttacatgtcaaaattgatcttacaatactaactttttattactaaaattctacaaatcatatacaatttttttttcttgatcatagtaaatacacaataaataatggaatgtccaatctgtttagaaaatataaatgaaagtgactcaaattttacaataactaatccgtgtaatcatttttatcattttgattgtattgattcatggacaaaattatcatcatcaacatgtccaaaatgtcgaattgaattaacttcaattattaataaatcaaataaaattgaaattaattataaacaacaagataaattagttaacatgattaataatgaatcaacttcaattgataatcatttaaatactgaaagagataatcaaattgatagtcatttacataatcaaaaatgttgtatctgtgataactttgttttgattaatcaaattataatttgtccccaatgttcatcattatatcatagatcatgttctgatggtttaaattgtccattatgtgaagaatggattgataatgttacttctccctcatttaactagacgtaggagaaataatcatttaaatattgataatgataatgaatacttatacctaagattgttgatgaacttaaacaatagaacaaataatgtacagaaagaaacatctaatgatacagaggaacaagcttggaatgtgttgaatttgaatacagaatgaaaaaactacttgggcacagcctcctatatcatcttctatagccagcaactacaactgcagtttcatcatcatcatcgtcaaatattactactaccttctacgattgaacggaaattgaaaaggccaaatagtcaaaaacatgaactgaaattaactcataatgcattagctaaacttgattcaaaatttaatagttcaaatagtaggaaaaatcctaaaaatatacgatcacaaataatcccacatcaaagaagaatcatatgcaaacctgatgaactttcatttatacaaaaattaattattcaaaggcttttattgaagccaataatatcaagttctgaaatttctaataaattatcatttgatgattatacagatttaaataaattattatcacataaattatacgatattataaagaaaaatgaaataagtatctcttatattaacggtataatagaattagctgaacgtgaaggatttcttccatttgagaatagaaaagatgttgataaatttaatgtttcattccatgataattcaatagttacaagatttgttaactgtagttggctaacgaataataatcatattaatacattaattaatgatgaaattacaaaatttatgcaagataaaagtaggtaaactgctcataacggttcattaaaaagatattttgttatatattaaatattaaatattataattgtttacagataagttgaataaatttcagttattccattaccgataatagtttgtccttcatcaacatatttattagtgtctttatctaataatttgatatcaggtgcaaataaaactaacttattatctttgaatataactggtgcgtttgtgaatgctatagtatgattcaatcgtctcctatatttgatgcatttgaatctttcattgttcttactattaccatttgcatttttatttccattttcattattttcattattttcatcatcatcgtcgttatatttatcattgctaccaccacttgatttacttaatctttgacttcttgaggggacatcagtataaactcctccactcagaatatattctagattatcattttgactccaaggaccaaaaaattcaacattataaataattgaaacatttattattttccagtcccttctttttaaatctaatgcaaaagttgcataaaatttagatcgcttctgtgaatcatagaataaattctgtttctgacctaagtactaaatttcctgtatcatcatgttctttataataaaatttttgacaacattttaaaccattttcccaattatcaattttcgatttaccatctttatcaaataaattttcattatcattattattattaacatgaaaaaactcaaaagttttcttatcatagtgaactttttgaatacctccaattatatttatataagaaccagaaataaatgcttgatgaccgcagatactcggtatttgttttatacgtgcaatatccgttaatctataccataattcagtttgaaaatcataaatccatgaatcatttaaaattgatttattataaagaatatcaaaattattttcattgacaacttttgtatacattattgaatgatccacctaaaacaaataaaattttattctttaatgacgcaattgaacttgtatgtaaattattcatcgaaaatggtgaatgttgtgatgaacttgtattattatttgaagaatttgatgatatacttgtagttgctgatctagtcgattttgatttacttttatcaattaaaaatgtttgtggtgtaaatgctagattgatattatgttttttctttattggatttggtgaaaatattttgacttcatcaactttttcactatctttatcattatcatgtttcttttcatatgtaaaattaaggtcactattatctgatgaaatatcatcatctttccatttgaaaaagttactgaatacactactatcaatcagattcaatgagaagaaacctcttggagctggccaatttgtatcactatgattaaaaacacctgtaaattggaattatttgaataattaggtaatttattcaaattattatcaataatatagctaaaaaattcatcaactaaactaaaattactgattggacttgcaactgcttgatctgatgtaccattactgtcaagaaaaaaatcacatttccataaatcattcattgcaataaatgtagtaccagaatcatgcaacttataaccccccatgacaaaaatggtagaaggttctttataacttgttgaataagtttgtttaatattattcatattgctgttattcacatttttttgatcatcaaaggtagatttattacacattgactttattttcttcaattgaaacagagaccattgaatgaccgaatcttcggaatcgacgttgaaaaagattgaactatatgatggatgaactgataatttaatctctctaaatttacaattaattatatcaaataaccaaaattgatcatttaggattaattttttctcgattgtacaatgcaattcatcagggtatctaactgtagtttcaatatctaaaccaccataaaacataaaatatcgattacttaatttaactgcacttgaacaaatcagggatcttggggaagaatgtgaaataatagaactaacagttgcactatttgaattcagcataaatttattcaacacatcaatattcaataccttatcatcattattattatcattattattattattatcatcattatcattattgttatcattattattatcagttattgttatcattcttattctcattattattagttatggtttccattactgctgttagtagtattactacttgatttacgatgatgactattaatattattattatcatcaagattacaaacccatctaaaagattttgattccggcagatattttctaacagaattaaaaggttttagagacattgattctattttatttttatccaagggtaatggtaaatcataatcacaaatcattttaaaattttctggaggtattttaaaatttttagttaatttttttaaagttttttcatattcatcagttaacattgcatttataccaccatataaatagacaccatcaggcatatcaacagcaggtatgatatgaaacaccagctaatggttgatctgagaataaagttggtaaatttgcaaaactatcaaagttttgaaattgttcacttctattagttttttgaatattttcatcatttgaagtaattgctctataaacttcatgagatttataataatcaaatgattcatttggaaagaaattggatttattagaatttgatgataatgatgttttcaaatttgaaaaatattgatgatatttataatttgctttatcatatttattaggatcagataatgggacctttgaatacatcataatagttgatgcaggttgtaaatagacaggtagtccgggtctccgtaggtattcctccattcttgtataataattgccaatacgatagacttgtgtaaatggatcagaatgagtttgtgaaggaagaattaacagctacgtacataattgtggatgtaccaaagactcggcgtaaaattagggttgcaacttgacacattttggtagcgataaggtttttcatcaacggcatatatcccacattgctaaggttttttcttgttgaactatacgttacttcgcttgctagttagatatattagatattatatattatatagagaataattaattggtaataccgtaatagtgaaggtaagcagataaagttttagtaccttcaatataattagcaacatcaactttttcattaattgaatgtgcaccatcatcacctttacccattggtaaaagaaggacatttgattttaattgttgttcaaaagtaagagtaattggaattagaaccaccttctctagttaaatctgggtcaataccccaaactttctttgttgctaatttagcagcagtaaattcattattaaaaggatcacttacccaataagcaccaccatgaattaattcagctttaaaagtatttggagattttaattctttaaatttttcattacaataatcgataactaatttatctaaagtatcagaatcgatatttggaacagttctaatagagaatttaccaataacttgtgaaggtataacagttttagcaccagaacctgagaatgcaccttcaataccatgtaatgataatgatggatatctccatctatgcattaaaatatttttcttatcttgataaattgcagtatctgaaccatgaagctaaatttaattcattaacatcaaattcaatatcattatataaaccatcttccttttcagttacaggtgcaaccatttcctttataccaggtatattaatttcaccattaacatcaactaattgggacataactttaattaaatcagtcattggttcatgaataacaccaccgaaaatacctgaatgtaaatcagcacctggacctttaattataatttgataataattacaacctcttaaaccataagttaaaacaggttttttagtaccaagccaataattatctgatatacaaacagaggaaacatttttaaaataatcatttgcttctctttcaactaattcatctaaacctaaagaaccagattcttccataccttcaaaacagaaaacaatattaacaggtaattctaaacctaattctctatgagcttcaatagaatttaaccaacccataacaggacctttatcatcagttgaacctctaccaaataatttaccatctttttcaataagggtaaaaggatcagaatcccaaccatcttctaaaagagcaggttgaacatcataatgaccataaattaaaacagttttcttatttggatcattaccaaattttgataaaacaattggaggtaattgtaaattttcatcattaacaggtggaggttgaatacctaaatctttaattgtaatatcatcagcacctaaattttttaattcattctttaaaaattcagacatttcgaaaacttttggtcttaaagtttcatcaccagaaactgaagggattgaaacagcatttgataatctttgaataaattttggttttaattcatcaattttagcaaataaaggatttaaagtagaatcaattttagacattttatttatattaattttacctaaacaataatctggaatgttagtatttgataaagatcttcttaaattattaaaattattaaaattattaaattttttagaataactaataaattttaaagatttaagggaattagaaaaaataaacataccctgttgggagaataaaagaaagatattaattaaaataaaataaaatggaataaaataaaataaaataaagtattcaacttacaataataatcataatctctaaggacccattaaaagagccacaagagtaatgggctacaaaaatcaatcaatcattacgtaatacaaaatacaaaatagacgggacgctgagccaccattttttttaaaacgaggtcgatgagactatatttggaaatgaggggtataaaggtataaaggtataaacccgtttcaataaggggctcttttactattaataaatttataatggatctcttactagtataaagattatattactagtacaattgttagctctattttattataacactagtgatatatttgttccttatcttgtgcattagtttactattagtaatgtactagtatttgttaggtatatgcattaagtacatgcatactaagtataggaagtccgacgcatagtcccctcttcattaacataataacaattaatccgtgcaccccacacagagagcaacagatactggatttttgactcttttatattttaccgacaacttaatcaatatgacacattttgtccattttttctaattttcagtgcggtaaaactggaatttttcaacttataagtttattcaaatcaacggtttttaatttagtttatcctttatcttttgatcatttatattttatcttttatcttcttttatatccaacaaacaaaatgtgtggtattttcgcagcttatagagtggatgatatccaaactttcaaaccaaaagctttacaatattcaaaaagaattagacatagaggtccagattggtcaggtaatgttgttagcaaattcaacaattctttgtcatgaaagattagcaattgttggtttagatgcaggtgctcaacctattgtatcaccagatggtagatatactttaagtgttaatggtgaaatttataatcatattaatttaagaagtcaaattaaagattatccttttaaaactttatcagattgtgaaccaattattccattagttcaaaaatatgatattgatgctccaaaatatttagatggtatgtttgcttgggttttatatgataaacaagaagatagaattattgctgcaagagacccaattggtattacaactctttatatgggtagaaaatcttcaagtccaaaaactgtttatttcgcttctgaattaaaatgtttaactgatgaatgtgatgaaattaaagcttttccctcctggtcatgtatatgattcaaatactgataaattaactagatatttccaaccaagttggtgggatgaaaataaaatacctgaaactccacttgatttaactttagttaaagaaactttagaaatggctgttagaaaaagattaatggctgaagttccttatggtgttttattatctggtggtttagattcttcacttattgcttcaattgctgcaagagaaactcaaaaggctgctgctgcctgaagaaaatgttgcaatcgatgcaaatacaactcttacaggtgttgatgcaaagggtaacctttcatttactggttggactaaattacattcttttgcaattggtttaccaggtgctccagatttaattgctgcaaagaaagttgctgaatatattggtactattcatcatgaacatacttttacagttgaagaaggtttcgatgctttaactgatgttatttatcatttagaaacttatgatgttacaactattagagcttcaactccaatgtatttattatcaagaaaaattaaagctcaaggtgttaaaatggtcctttctggtgaaggttctgatgaaattttcggtggttacctttatttcgctcaagctccttcagcttcagaattccatactgaatgtgttaaaagagttaaaaacttacattatgctgattgtttaagagctaataaatcaacaatggcatggggtttagaagctcgtgttccattcttagataaagaattcttagaagtttgtttaaatattgatccaagtgctaaattaattgatccaaaatcaggtaaaattgaaaaatacattttaagaaaagctttcgatacaaaggatgatccaaatgcaaaaccttatttacctgatgaaatcttatggagacaaaaggaacaattctctgatggtgtcggttattcatggattgatggtttaaaggaattatcagaaaaatcagtttctgatgaagaatttgcaaatccaaaacctgaatggggtaatgatatcccaactactaaagaagcttatttctatagatgtaaatttgatgaattattcccttcaaaggctgctgcttcaactgttatgagatggattccaaaggctgaatggggttgtcatgaagatccttcaggtagatatgctaaaattcatgatgctgctgttcaacattaaaaattttatttgattattctttataatattaataatatacaatttctataaataatttttttcttaattaataaaatacataatataatttcttatcatgaattaattaaatctttgtatcaattatacatcctttaataaatttaaaaccccttgcatctgtttgttcccttgtaacaacatcaactttataatcaataattttttcatcattaatttcatcaatttcttcattaagatcaaattcatcttccatttcaatataatcaatattttgttcaatttcttcaaaatcaggtgctaatgcactccatttttgtaatggtttaaccccccacataaaaattgtaccactatccattccatttgcacaaacacaacaaacattaccattaattgatctagttgcccaatgaacatcaattaattcttcatgtgcaccttctaaaatttgaactaatgatcccatacttgtttcccaaacataaacatcatgtgcagctccactaccaccctgtgatgatgcacaaacaaattctccagttggtgaaaatttaactgtattccattgaattctattaacaacatcttgatatttttgttcaatttctaattcaaatgttgtatcttctttataccaattacttatatcatattgtttaattattctatcacttgaattaacaattaatctattaattggtacattgtttaacccaaataataaatttgattcattatcataatatgccttttcaacaatttcaacacctttaatattaccattacaaatcttaatattttttataacctttaagttttcaatatcaattatttgtaaccatcccatacttgtacctgtaattacatatttaccattgaaaaatgagaaacaacataatgaaactccaatattttcattacctacatcaatatctataatttcaccatttttaacaatacagattcctccatcaactttacaaacaataaccatccaattatcccatgataaatcttgtttaattatatcaacattccaaacaccacctgtaaatacattttcccaaattaaattaattttagaattttccaattcatgaatacaaattttccaatctcttgaccatgataataatccacaatagttttcattataaatccatcgtagtccagttattggcattgtatgtgatttaattattgtagtaacattatttgtccatgtatcaattattaaaattgtaccatctaataatcccgatgcaatataatgtccacatggcgaaaattgtaatgatgttgaatgtccatatgataatgtcattgttaatgttgtaggatattccgccgttataaattgtgggtcatgtagggataagttcattgtcttgtttgttagacaaaggatcaaagaatcaaagaatcaaagaataaattaacgttaatttgatcttacacgtagagtggaaaaattaaaaataatttaatcggattttaagataacacagttctttaacgatagctagaaaaatttatttataaatacaaaataaaatgaaatgaataagagagaaaaagtaagttagattaaactacaatgaacactacaaccttctttgtgcatgtaatgaattatcatcataatattcatcatcatcgtaattgttattatgatgatcattgtagaaatgttcttcttgaacaggtgatgatggatgaatattagtaaaatcagttgaattgattctttcaccataaacacttaaaccagctgtattatttgtcaatccacttagatgtgattcatttctattatgagagaatggaatttgaacactatctgattcaaaaggattttcttcatgtggtttaaatggatttttggtagtatcaccaataactgaagaatctagtgaatcacgatctgcattaatttgattatcattattgttaatattattactaattggttcaacttcattgttgttatttttgaatgatttatttctacttaataatgatttaccccttgataaaaagcctgtaataccacctttttgagtttcagaatctgatgaattatttagatcattatttgtaaacaaattagtttcagaatcttttaattcaggtgaatcagcttcaagtttttgattatgcatatcattttcccaattatcattatgatctcttgcaaccatacctaattcaaataattcatttgatgataaattatcagtatttaatgattgatgtttacgttggaatgaagttctatcatcttttgttggagaaaatttagcatcaggatttttagagaaaattgtgaatgcatgctaataataaaataacaattaataaaattaatgaaactgctgcattcataataaagaaaactaaacccataactgatgcaactctaaatggttcattatagatacctgagaaaaatgtgaaaaagaatgaattaattgttgtaataacttgaatgaaaatactcaaaacatttgtaaatttatccatataaggtaaataatggcacatcaaaccaagataaaacatatctaaaatccataatgccattgcttgagttctacctgatgattgcgcaagaccaacaaagaatgatttaacaaaaatatatgataatgaaactgcacaaaaccaatattttgtcgcatttaacattgtatataagaatccataacgacttaaaatttcaggattaccataaagtaaagccgctggattaccatgttcatcaattgattttttaccatatctaataacttggaaacatgcaaaacctaaagttgataaagttaaaattaagaaaaaaactgcaattgtgacaactgcacctgaatcaacttgtgtaaattcgtataatgataaaattaataattgagggtaaccaatgaaaatatatcttgctaacatacctttaaaagttggtctccaatcagttctatattcaatatttttattaatccaatttgccttttgaccctttgataaagttttattaaggtatctataaatgaaaaagacaccaattaaaacatataaacataagatgaaaaatgtaaaacctgtacaaacgattgatgaaggttcaatatttgaatcaaatccaatacgtttaatacctcttaaaacagttaaataatcatttgattcaacatgagtcattggaataaaccatttagtatcttgatcagcatcacttcttggattaatggatttagtgtttataattgaatcaatattaaaatcaaaatcatcatcataaccataatcatatgaataagaagaagaagaagatgatgataatgatgaggaagataaaccaaataatgatccaattttactaacaaaatttgaatgtgatatataatctattgaacgttgagttaaaattgatttaacaccacttgttaaaaattgagttggtgtaccaccagttgcttgaacaaaccaacggaatattttttgcataaattcaattctaattaaacccattgaccaagctaaattttctgcccaagaattagcaatcattggaacttgatcagctgaaaccattgcaataatgacaacactttgaaaataagtaaataaagaaattgcagcagctgacattcttgaagctgaagctgaattaccgaaaattgacaataaagcagaaattaataaacctaaacctgcaacgacagctgtagcccatttagcaccttcatgagaaacagttttaccattatcgaaagaagcttgtaaacaacctaataaaccattattttcatcagttataactaatcttgcaactgcatctaaattagggaaagtatatgcaatacctggaattttatcaacataatcttgtgaaatatattcaattgattcaacttccatatgagatggagtaattggacaaaattgttttaaatttaaattacataaatcaacagtttcatgaataatatcaaaaccaaaagcataaacagttgcaaaagcttttaatttaccttgaatttttgcagtaagtgaaatatcataattaattgaacgtttttcagcatcgaaaacaacattaaaataatttggtataatatcactattatttttcatacagttaactaaagaatttgaatataatcttctttcagcatttgtaacagtttgataatgataagattaataaaatgaaagatattatcttaaaatgtaagtttgatatgctattaaacatattgtattgtattgtttgttaatctaattttctttgttaaaatgagtaacttatcctaagatatatataactatagagctaagcaggaaattgagtagcctgatgagaagaagatgaatgaaagtaatctgaaaaacaaaagaaaaagaaaagaaaaggtgataataaaaaaaagacaatacaataaacaatcaccctagtaaaactcatctaagctcagttacataacagatcaaatcaacaaggtgagggagaggaaaaagaaaagaaaagttttcattttttcatttggtttgtacgtaatcatcaacatgattattaatcatttcattatttcattatttcatttcattgacattaaataacttatataatataaaagaagtagaggaagaagtaaaggtataaaacaaacacaaaaagagggaaaaaaacatacatattagaatcatttcttcatatcatgaacaactttaataattttagcaacaacatcaggatttgataatgttgaaatatcacctaattgatcttcttcaccagctaaaatttttcttaaaattcttctcataattttacctgatcttgtctttggtaaatcatcaacaattaaaattaattttggtgcagcaaatggtccaatttctttacgaacagttaaaattaattcctttttaattgaatttaattcttctaaatttgaaaaattcttctttaatgaaacaaatgctgcaactgctgaaccagttaattcatcagggaatccaacaactgcattttcactaactaatggatgttcaattaatgcagcttcaatttcagctgttgataatctatgacctgatacattaacaacatcatcaactctacctaaaatccaataaaatccatctttatcccttgcacatccatcacctgaaaaataatatccatgataaggttttaaataagtttctaaatatctattataatcattccaaattgatcttgtcattgatggccaacaagttttaatacataaaacaccttcaacattattaccctttaattcttcacctgtaactggatcacaaattgctggttcaataccgaaaaatggtaatgatgcactacctgcctttgttggtgttatacctgctaatggacaaattaaatgtgaaccactttcagtttgccaataagtatcacaaatatgtgctttatttctaccaataaattcattataccattcccaaacatctttagcaattggttcaccaactgaacctaaaactctaagtgaatctaatttaaaattttcaatatatttttcaccagctcttttcaataatctaagagcagttggtgcaacataaaattgattaactttatatttatcaacaatttcccaatatcttgaaaaatttggataagcaggtgtaccttcgaaaacaacagttgttgcaccatttaataaaggaccataaacaacataagaatgaccagtaatccaaccaacatcacctgcagtgaaaataatatcatcttcatgaacatcgaaaacatatttagttgttaacattgcacctaaaagataacctgcagttgtatgtaaaataccttttggtttaccagttgaacctgaagtatataaaaggaataaattatcttcactattcattggttcaggtgggcaataaggattatatttaataacttcttcatgccaccaaacatctcttttagaattccaaggtatatgagaattaccagttctcttgaaaacaataacatttttaacatcaggacaatgaattaaagcatcatcaacaatttttttagtttcaataattttaccacctctcattgattcatcagttgtaataacaatttttgaattagcatctaagacacgatcttttaaagaagttgaactaaaacctgcaaatacgacagaatgaattgcaccaattctaataattgccattaatgccacaattgcttctggaatcattggtaaataaacagcaactgtatcaccctttttaacacctaaattttttaaaacttgagcaaatttacaaatatcttttaataattcaccaaaagtaataattttaccttgattaatttcatcagcttcataaataattgcaggtttatttggatttttaattgcccatctatcaacacaattataacaagcatttaattcaccatcagtaaaccaagcagaaggttcaccattattatctcttaaatgaggagaattagggattttagaatttgtaaaaggttttgaccaagataaattttcaattgccattttaccgaaaaattcagcaggattttcaattgattctttatacattttttcataatcattaaaagaagttaaatgaggttttgaaggatgtctttcaaggaaacctgaaggaacttctaaggcatcaatattcatcaaatgttcattctctaaatgagtttctggcattttgataagttaatttaatttaatatagtatcgtattgtttgattgatataaggaattaaaatataatagataagattattaaagataagaaataaaaggagatgagccaagtcaatataaaatgggcgaatgataagatatttataataaattacattaaagaaagatctttaatactactatcacattaccccacatgaataaaagaaagggtcccacccacttcagagaattaaaaaagggtaaatctgttagctaatagtaatatcaaagtaaagctaaattaaaggtaacctactgtaatagtaaattccagtcatccgttgttaaattgtaataaaacatgatgatactcttactaagaagagccttctctaatataaaatttaaactccgctccgaatcggatgcctggagagaggggttagtattattcataatgttatattacgtcatcatattattattatcacgtgacaagcgacgatgcgactgtgatattttttttagggcttttgatggcttagcttataatcactaaactaccaaatgttaaaaatagcaacttaaaaaattcctcagtgaaaaaaagaaaaaacgcgttttctgctctactactaagagatattagttaaatttatggagagaggctgattttgtattgtattttattatgaatcttatattattgtgatggtgatggtgatggtttattttattttattttataaatatcttattttatctcatttattcttttatctatcttcttcctaatctcactagacaaagatgatctttcgtaatttactatcatatatactactaatatcattatctataaattcttcaaatgcttcaaaatatttaagatcaaatactttacttacttgtatggaaaattctgaatttagttcaacttttttcgatgtttattattatcctcataattcaactgctgttttcactattgatggttcatctgcaatttctggtaaaattaaagctcattttgaattaattgtctatggtttatctgtttatcaagattcaatagatttatgttctcttaattatccaactatttgtccaattagttctggtcatattaatttagaaggtacttatcaaattcaatctgatttaactaatcaaattccttccatcgcttatactataccggatttagatgcttatgttttaattatggtttattcaactgatgatgatgataatgaatctcccctagcttgtcttagagctgaagtttcaaatggtaaaactgttcaaactagatatgcaggttggccaattgctgttatttcaggttttggtttagtagtttcctcatttgttactattttaggtcattctgcaactgcctctcatattgcttcaaatgctgcatcccttttcatttattttcaaaatttagcaattatggcaatgatgggtgtagctagagtacctccaattgctgcttcttgggctcaaaattatatgtggtctttaggtattataaaggcggattttatgcaagatatcatttattggtatgttcaatcaactggtggtgatgttagtgatgttctttcaaatagagatataatctctttatcaattcaaaaattaaaacattttgtacttaataaaagagcaattacagctgctgctcctgccgctgatgattatttatccgattcaactctgtattataatgatgaatataatttaacttcaaaaactttggttttaagaggtattcaaagagtggcatttttagctgatatagaaatttcaaatgttttcatgacaggtattatcttcttccttttcattggatttgtacttattttcttaatctctattttcagaggtatttgtgaaatcttaattaaatcaggtacaattaaaaatcatagatttgcatattttagatcaaattggaatttaattattaaaggtgcaatttatagatattttgatatcacattttcaacaattgtcttattatgtgtttgggaatttactcaaaataattcaagtggttgtttagcatttgcaattataatctttggtgttgtaatgattttaatgagttatgcaacaattagaattttctttgaaggtatgaaatcaattaatcaatatcaaaatcctgcttatcttttattcggtaatgataaattttattttaaatttggtttcttatatgcacaatatttagcaagaaaatattattgggttgttttaaatttcttttatttattcattcgttcattattaattgcagttttacaaactaatggtaaagtttgtgcttgtattatttttgcaattgaaattattcatacagttgttgttatttggtttagaccttatatggataaacgtacaaatattttcaatattttcattgcagttgttaatttaattaattcaatttttttcctgttttattcaaatgttttcaaacaacctccagttgtttcatcagttgctgcagtcgtttattttattcttaatgctatttttgcattaattttattaattttcacaattgttacttgtacaattgctttattacataaaaatccagatgttcaatatcaacaagttaaagatgatcgtgcagcttttatgacatttgaaaataatgttaatcaaaataaagatttagaattatcagcattaggtgaatctgcaatgcaaggtcaagatcatgatgctttcttttcaaataaagaaaatgaaaaaccaaaattatctccatatgaaattgaaaatacaaatagtaaatcacatcttgaaccttataatcctgattatagtaatgatagtatgaatacaaataataattctaataataataaattaaatccatttgctgcaaatgatgatgcttcagttgttagttcaacttcttatgatagagaaaatccttttagtaataatcatagattaagaaatcaattataatcatcatttactatcatttactattattaattctttactaaatttatttaacttttattttgtttgtactttatttattcaacgtttattactttctttttggtgtttatttatgtctgtatattttttatcaatattaaattcattgaaaaaaattaaagtttcgcattctaacaattaatctacatctttctttccctatggatgataggaaggatagtattgagacgaatactacttgggatagtttagatgatgatgcagtattgtcatttattaataaattagattctcataatcaaattaagaaaaataatgttaaaaaggaagttttgacagatattgatactgatgtagatacagaaaatgatgatgaacctgaattaaatgataaacctcaagaaggtcaaagtaatgatgatatgttgtatgcttcaatacgatcatcacaatggagttcaatgaatgattcaaaatttatcaattatgttaataaattaactcaatcaaaacaatttgatacaaccattgaagttgaaaatacttcttataatgatgttcaattattatcatctcctatattacttggacaacgtaaaatagaagttgagacaagtgataatattaatgatggtgaagataatgaagataatgaagagaatgaagataatgaaaatgatgaaaatgatgaaaatgaggagctaccatatgatcaatacgataattacgaagattattttgctgaaaagaacagaaaacaaaaccttcaaggtgaagaattatcaaaatttttaaaagctaatgatgattcaggtaatgattatccacccattttcaaaaattgtgcaattcatgttaatggtagaactgatcccgatattttacaattaagaaaattaattttattatatggtggtaaatatgttcattatttatcatcaaaaggttcagtaactcatatagttgcagagaatttacccccaaggaaaagaattcaatttggtaattgtaaagttgtttcacctaaatggattatggatagtattgaagctaaaagattattggattattcattatataggattgaaaagttgaatgattatggacaacaaattattaagtttcctaaaaaagatatagttaaagaaaatggggagattgttgatgataatatcgatgatatagataatgatcaattaagtcaagaattaagtcaagaacttcaaaatacaggtattgatgcaacccacccagattttcttaaggtgttttttagtaaatcaaaattacatcacttaagttcttggaaatctgaactaagatccaactttataaatgaagcaatttcagttcttcaatcaaaaaagatcccacaaaattcaccacaaaggataataatgcatgttgattttgattgtttctttgcaactgtatcagcaatgaaacataatccaccgatagatattaatacagtaccatgttgtgttacacatggtggtaaatcagcagatattgcatcttgtaattatattgcacgtcaatttggtgttagtaatggaatgtggttgagtaatgcaaaagaattatgtccaaatattgtttcattaccttattattttgaagaatatggaatcatctcaaaaaaattttatcagaaattattgtcaatggatattaatacaatcttaccagttagtattgatgaagcattagttgatatatcttatctttgttcacaaggtgatcaaaatgtggaaaaaatagttaaaggtattaaagaagggttggatagtgttacaaaatgtactcttagttgtggagctgggagaaatgttttgcttgccaaacttgcattaagaaaggctaaaccaaatggtgtctattatatctctgataatgatgaccaaattgatgaattcttaaaaactgtcgatgttaaacaactaccaggatgtggtaaaaagctttaccagaaattgaacacattttacccaaataaggaagaaataacagtatcagatttgaagaaaattgataaatcatcattaattaacacatttggagctaaaatgggtgcaaaactatatgattatgctagaggtattgacgatctatcaattgatattttgaaagatgctgataaatatacaagaaaatcagttaatattgatgttaattggggagtaagattcagtactgatcccgatgttgaaacttttctgtcaagattagcaaatgaattgagtgaaagattgctaaatataaaaatgattggaacgtcaataacattgaaattatcaatacgacatcccgatgctcctattgaaccaactaaatatatgggaatgggtagatgtgaattcacttcaaaaactgctaaattgggtgtggccactagagattccggtgttttaggttcagagttgaagtatttatggaggtttatgaatgttgaacctaaagaattaagaggtgttggagttagcatgaataaattaactcatgatgattataatattgataataaacaaatgaagttaaactttacttctaatgtaaatctgaaacctcctattaccaataaaagtccatcaccagagagttatcattcaccagttaaaacgtcaagaagtaggacaggctcaccagtaaaagatgatccagaggagcaaattgattgggatgtgttcaactcattaccaccagatttacaattagagattaaaaatgaattaagaagaagaaagttacaaagctctccgaagaaacgtaaattatttgcaaacgataaagatattgctaatcttctttcacctaagaagaaaaaactgacaatggaattagaaaaggaacaatatttatcaccacataaaatcaaggaacaaaaacagaagaatatagtgtttcaaggtattcccgttacagatgaatcaattcttttaaaaaaattagttgcttggatggattacacattaatcgatcataatgagctaaatgagaatgatcttgaactattccgtgattttatgattcaaatactgtcttcaagtgacactttacgctttttacgaatataccaaacactgaaacgaagaatcttgatctctcccattcaagaatccaaacaatttaataaatggaatgaagaattagaaagtcttaaacagttgattggagaacagccattatctgattttcaatttaagttctaattttctctaaataatctacttattctatataacacaccttttaaaaatctttaacgattagtgaacttggagctcttaacccccattcagtccatgagccatcatacactgcaattttacttgaatcgtaaccagccaattgcattgcacatctaacaacacatgcggtaacaccagtaccacacattacgataactggttttgaatcatcagaaaatttatttttaaaaatattcttcaatgacattgttgataaaaatgatttttctggagttaaaagatctgtaaatggtatatttattgcatttttaatatgacctgatgataaacctggtcttggttcaggtgcttcacctgaaaatcttggagctgatcttgcatcaattaatgtatattcagaaccaatcttattcttttccactaattctaataattgttcgtaactgacaactttagatggatcaaaagtagcagtatattcacttggtggataaggagttggagaagtaactaatgtattatttactaatgtatcagatccatggaccttcataactaaatttggatcagaatgtgattttgtgtaagatgggtatgtatttagtatatataatttagagacatcatgaccaaaaatttcaaacatccaaacagcacgacataaactgaagataccttgttgatcatagaataataaatttgaatcatttttgatacctaattccctaactgatgattcaaaatcttcccttgttggtaacatatgtggaaatttagatgtgaaatctttaactttttcaatatcaaaaaagacagcattatttattctgcttttcatgaattcatggtaaccatttactggaacatttggcatataccaagatgaatctactggtattattgaatccggatgtttctgatagaatgaagctacacttgcaggtgctaccaatgagatcattcgtttgttaaaagtatttgaaaacttcagagatgatttaaagcttgtagtcaacattgataaaaaaattttttttctaggttactgataagaaactgaataataacaataattatatcactctaataggggtcttgccgataacaattgtccatttgagggtttcgtataggaataaattcaaaatcaacggttataagcgggtttacgtaatcacttgctatttttctttgactttctcatgttactgaaatgaaaacatgaaaatcggaggactcacagtaactgcaagaggagtggtgtgtaagtttcttgtgtgtaagtttcttgtatattagacaatagtgcttgtatcgaagcatctatattcttaacacacataatggactattctgatattttagggaatggagaggagatggaagaaatacgtgatactgattttgattcagttttgagtggtcaaattgcaactttcgaaaatatgtttgatggcaaaactgaacatgctgagaatgccattgatttcagcgatgaagatgaattagcagaagaagatgaagaagaagaatctcgaaacaaggataataatgataatgatgataatgacaacgaaaataatgaggaggatgacgatgacgatgaggaagatgattttatgaaagaattacaacaagaagcaatggaaggagtggagaaacctggacagaaagaggagactgaaatgaatgctgttttaggattaggtgttcccggtcatgtaggtttgcaagatttggattttgcatcaaact

SEQ ID NO: 6 - DNA, 2991295 bp, Pichia kluyveri (residues 1,495,649-2,991,295 of 2,991,295)
  >Nicaragua_Y298_000000F_chromosome
cactcttagattcaacaaaacaaattggtgattcagatatcgaattatctgatgatgatgaaagtgaaaatattaaaggtgaaacattcaataaaaaacttattaacaaaaacgatgaacatgatcaacaacaaaaattaattagtgatgaagaaagaaaaaagagaaaggaagaagagaaacgtttaaaagaagaaagacgtgctgcaaggaataagaaaattgttaagatacttttcccaagttttgaaccaggaaagagaatgcaattacaaaaacttttcccaattataccattagaatatacatatcaacaaccaccacctgtaactgcaccactattacctaaaaaaacattttttgaggttgatgatgatgaactcactgaatttaagatgtctactaaaaaactcaaagaatataataaactgaataaaagatctaataattttatgcctgatgctcgtatcattaatatccaacttgaggaagattcacaaactgttgaaaccaacgaacctaacaaacgaccaatcacaaaaatttcttatgatacagatctcataataacgacagctgattgggatgatgataaaatatttaatgttaacgatgaaactataaatttacctgaacgtaaaagacttaaatttgaagcaagtaattgggaagattgggttgatgatgacgaagatgttatttttgaaggtaatttagatttagatgctataaatctgaaacttgatatgaatgatccaaacttaatgttaattgatgattccaaacaacatcatgttaaaagcatgcatatcaataatgattcaagtatacctactacccaaaaacttttggaacaaaagttcagtatatccaatgataaggaatatgatttattgaaatcaaatacacaaataaaggtgagagctaccataggaactatgaatatagagcatgctcttcctgctatcagattacaatcaccatattatcaagtgaatcctcctattaaagaaaaaagaggataccatagaaataagttcaacgttagaacaaatgttagaatatttttttctaaaccaagaactagaaggaggaagaaagatagaggaaaggaaatttcagaaattttcaaaaattcaactgatcttaccttaggtgatactgctccatttttcctgtgtgaatatagtgaggaatatccagtatcattgagtaaatttggtatgggtaccaaaataattaattattatcgtaaaataacagatgatgataacactagacctaaacttccaatcggtgaaactcaaattttgggtgttaatgatagatcaccatattggaattttggatttgttgaaaagggtagtgtggtcccaacattatataataaacgtgcaagagctccgttatttcagcatgaaccactttcaacagatttcttattaattaaatcttccggtggtggtaatggacaaagatttttcttgagaccaatcaactatatgttcaccgtaggtcaagttttacctgctgttgaaattcccggtccacattcaagacgtactgcacaattgttgaaacataggttaaagatgattgcatttcgtagactgaatgcaagtgagcatactagaattgctgttaaagatttatctgaacattttccaaatcaatcggatatgcaaataagacaaagactaaaggaatttatggaatatcaaagaaatggaccagatcaagggttctggagattgaaaaattctgataaattattagattatgatagaatcagaagaatgttatcaccagatgatgtttgtatattagatgttatgatgtcaggacaacaaaaatttgatgatttagatatgtttagaagagagagattacaaagtactgatgataaaaaagataagcctgaaaataatcaagatgaaacaataagtcaacaagcagcaccatggaatactactagaaattttatacaagcaacacagggtaaagcaatgattcaagttcatggggatggggatccatctaaaactggtcaaccattaacatttttaaaaatttcaatgaagggagggtttaacaaaaattttgaaaattcatcaaagggtggtacaccaataaacattagtcatacaccatcatcaaataatacatatagtacaacagctcaacaaagattatatgaagatcaaattagaagagcgtggtataaacaagcaaataatttatctaaatatagaaatacagataaaccacgtattgtcgaactagatgaattaagtgattcaagacttatgataaatgctaataaagttgttgatgaggaagttaatgaaaaaccaagatatattaagattacacgtatggttaaaaactcatatggtattaaggaaagaaaagttcaaattgttaaagatccaaaagttgttgaattatatgtgaaaaagaaacaagaacaactattacaatctagtggtagtgcagacaataatatggttaattataactaatgacgaagaagaaaatatgaaaggttaagaaacttcttgaagaagaattaggctaaattagagaaacaagctgaaaagaagaaaaagaaacaaccgggtattacagcagctaatattgatagtgaaggtcgtcttagtggtaaaggtattggtaagggtaaatccactagtagacgttgtgcaacatgtggttcattgggtcatattagaactaataaaacttgtccattgtattacactattcacaataaatccaatcctaattatattccaggtactgaaacaccccaagagcttattcaaagtactgttaaaccacaacctggtaagtaatgtgtgtattgatctaaattctagttgtataagtattgtaatagtaatgtatgaagatattacgtcagcataaattttaccattcatgcatgcatgtgagaagttatcaattcagtttgacctttgataaattgttgatctttataagattattcgtaattgaacagtcaaaaagaagtaacaatggagagtacacgtaaagcaatacgtgtttttgatgcgtttcgtaagtctagataaagaattatatgaatgatgaatgatatactaactgaataaacttttttaaaatattatagccaaagtaccaccaagtgatacagttggatcatatagaggatcatattcaacatttgtaacatattttttcatggttttcctaatatgggttcaaattggaggatatatagatggatatattgatcatcaatattcagttgatgaaattgtaaggaatacattagatttaaatattgatatagttgttgcaatgccatgtaaatatttagatgcaaatgtacgtgatgttagtgaagatttatatttagctgaagaaattttaaattttgaaggtgtcaatttacctaatgcattttggaatatggcaaaaagtaagaaatcaacaattacgcctgatattgacaatgttttatcaaattcattagaagcagattttgttgcaaagggacaacgtcataatttagaattaccatcatgcagaatatttggtagtattccaattaatagattacaaggtgatttccatattacagctgaaggatatggatatagaaggccacaagttacacctgaggaattacttaattttacacattttataaatgaattttcattcggtaaattttatccatatattgaaaattcattagatggtacagttcaaaagacaagtaatggtagacatacatatcattataatttaaaagttgtaccaacaatttatggtaaattaggacatgaaattgatacaaatcaatattctgttagaatgtatgaaactgataataaatattcaccaggtattttcattcaatatgattttgatccaataaagatgtcaattattgaacaaagattatcattttttcaatttgttattaaacttgttacaattattggaggtttatgggttatggcaagttggttgtatagatttatggaaaaaattataattttaacatttggtaaagaatttgcaagacgtggagaggagaaaaaatctggtttattagatgatccaattgaagagtatgaaagtatctaataatgattttattaataaaacgaatacattgtaatattaaatgcctggtatataatatatagtatagattacttaaatgaaacaaacaacttttaattttaataattatttttgtaacagcattttagcttcttctttatttgatacggcaggaacgaattcagtaaatctataatattcatcatcatcgaatgtaattatatcccaatatttataaaccatcatataacaagccaccattgatatactactaaatagtgaaccatcaacataatgatttaattgattacaaattttatcactaactgcatataataatatttgagatgcagcaaaaaatagagttgataggaataatgcacctaaagcccaccaattgaaaaccaatgtaaagcaacaaataaatatttgagataataaccaaatacataacattattgcatttaaaacaaaataaaacacaaataaaggagttgtatgattatgatttaaacttgaaccccaacctttaaaagtgaaaattgaaattaaataattaactatgaaaacaaatattgaactaattattaatgataacattgccttaaatgaaccatcatcccaaaaattaaaacttgaaaaacctgcaaataataatgaccaacaagaaactgcaagattagcaatttggaaacttacaaaataagcataagaagatgaaccaggaggtgaaacacctgtatcaataattaaagttgcaattgtttgagatattgaaatccaaaagaagaataacatttccttacgagcaactgaagtatatcgtgatctaacattataaattatcattaataagacaattaaattacctatattaataaaagcggtacctacttcaaatattaaagtatttgcaatattaattgatctagcataacaagttggtaatataccattgaaaggataatttgaaatatttgaagatgatgaatgaagatgatgatgtttgtaaaggtcgtattaaagagcaaataggaagtggtgatttctcacaaatagaagcaaagtctccaaataccatttgtattagtatttattggttatagtgtagtatcaactaacaaaatcaaatgaaatatagatcaaagtaataccctctttgttctaagggaacattctatattacttttttttcatcatcgataaataatttattacgcgtttgatatagattttgtatagatttgattttctgtgtttactatatatcataagaactataactgttcttttttgtattttttctatcacagaaaagtttgaaaaccctacagttaattacctttaaaatttctagtcttcaaaacagagatcatataatgttgcaaaacctgcatgtagaatgaaacgtgtttgctaggagaaaaagccccaatttgactaccaactaccacccgcgcatgaaaaagagaaaatcccaaaaaggcaataatggagaaaaataaactcgaagcgacgcatagtgaagaaatttaaattaaaatttaaatttaaatttaaagaaattttcgaaattttgagaaaaagtgaaatttcagtgacttattttcataattattgtttgatagtgtgttgataaatgattgattggtgattatttaatttatcgtatttctgtcttttatcttaattcttatcattctctcttctcttcctcttcttttagcagagtaactatataatgagtcacgttgataagaaacaatctggtttagctagaatcttaggtcctgcagttgctggtgtctgtgaaattggtgtcttccatccagttgatactatctctaaaagattaatgagtaatacatcaagagttaatactttagataaattaaatactgttattttcaaagataaggcaaatgctccagctggtaaacgtttcctttcacttttcccaggtttaggttatgctgcttgttataaaattttacaaagaatttataaatatggtaggtcaaccattcgcaaatgaatttttaacttcaaattttaaaaaatcttatgatgatttatttggtccaaaaactggtaaagctttactttctgcaactgctggttcccttatcggtattggtgaagttatccttttacctttagatgttttaaaaattaaaagacaaacaaatcctgaatcttttaaaggtagaggtttcttaaaaattattaaagatgaaggtttctctctttataatggtgctggttggactgctgctagaaatgctccaggttctttcgctctatttggtggttccgctttcgcaaaggaatttatctttggtttaaatgattattcatcagcttcttggtatcaaaattttatttcttcaatttgtggtgcttcagcttcattaattgtttctgctccattagatgttattaaaactagaattcaaaataaaaatttcggtactaatgaatcaggtttcaaaattatcaaaaacatggtcgcaaatgaaggtataacttcattctttaaaggtttaactccaaaattattaacaactggtccaaaattagttttctcatttgctttagctcaatctttaatcccagcttttgatagagcattaaaataattttaattttattttaatctgaaacaaatttcttgtaaataatgtattaaaatagattttatattaaaaaattatatagaaagacatctaataacctaattccattttaatcgaaaaaaaaagtaatatgatataatatttattaattaactattgtgtttataatttatttacatgatatatttatattaatccttatacaaataaactaattatcagttttagtttcagtttcagttgatttattctcagattgatgttcatctaataatttttctgcttcctttaaactcttttcattattttctctctttatttgatctgctaattgttgtaaatcatcagtaaaaccatttaaataatcattaacttgttcaaaacctggacctccattaacattatccattacaatattaacaatttcattatcaaatgtattatcactctttgttgcatttatacttgatgaacgtaaacttgaaatatattcccatgattcatttgctgtattattaaatgctgaatcaaccattaattctaatctctcttccgttatagcaaaatttgatgctccattataaagttcaaataaactatttgctctttcttgatcaatctttaatttagtttctaatctattagattctctctttgatcttaaaatttcattttcttcatcagttcttggtctaactaatggaccttctaaataactttcaactgtaggtgcagtatataattcagcacgtgatgctttatgaagtttattctcaagttctgccttttcttcttcaatcttaattctagcaacatgttcttctattctttctaatcttttgacttcagtttcataagattcctttaaatattcccttctcattttagcattttttattttaaattgttgtgaaattggcattttagaaatttcttcatcagtatattctttctttggaaccattgcagattttttcaataatttttcaggtgttgaaacttttggtaaaatataatctcttgaaatcttctttggatgaagaattccatctgcatatcctgtatctgttggtttcttataaacttcatgtttaaaaggttgtttaaaaatttgctttggtctaggtaaaagtccagactttcctgtagctttcatcaatcctttagccattctgttatatttaattagttgatgaaattaaagggaatatgttccaatctaaaagaagtaaataccttttcctgtcttactctacattgtattgaaatactgatatattttttcatgaagttgaacctcgacgttgtgaaaaaatattgaattttgttactacatgaatttttgagagagagtcccgtcgttttgccatttacggtaattattgtttatattgcatctctttaactgtttcttctctgtgtttcatattgtaatggacggtaaaagaagggttgtaagtgagaatggaatcttacagaatattggactacataatgatcaatctatactgtcggaaagagaaatagcagaattaaatacctccatattacaatatttaaaaccaattttacaaaaggaaaggcacatttatcatattttagaacaaaaacttatagacacacaatcaaattcattacaatattcagatctaatacccaatgaaatatcggagaattatttacagaaaaaatggtcaaatactattaaattacagaaaaatctacatgaattagagaataagaataaaattttagaaaatagaaataatgaattaatgtcagtaattaatgaattaacattaaaattagagactaaatcaagtacagaatcattaaaaaagatagattggatacctaatacattaaaggcatcattaaaatatcatacagcatcaataactgcaattgttattcatccatttaatccatatttaatcacagcttcacaggatggaatgatagttttctggaatttacttgatttatctgaacctataacacaaattaaaacagctcatacaagttcaattaattgtttaaaatttcaaccaaattcatcaaatttaatttcatgttcaaatgatcaaacaattaaaatttgggatttatcaaatataaataatttaaataaaactcctatgaaaatattaacaggtcatgaacatgttatatcttcattatctattaacaaggagaatcccaatattttaatatcttgttcaagggatcaaaatattaaaatttgggatttacaaacaggttggacagttgataatataattggacattcagattgggttcgttgtattgattcagttggtgattatattatatctggatcatcagatacaagtattagattaacacattggccatcaaatacaggtattggtttatgtattggtaatacacaagtaattgaagatgttaaatttttaccattagaatgtaataaatatttagataatttaaagaatgatagtaatgatacagatattgaagataataaaatttatgaaaaattaggttataaatatgcagttagttgtggacgtgattctttaattaaattttggaaattaccgaaagcctgaatttaatccaataactggtgatccaattgttaatagtattaatccatatggtgaatgtattttacaattaaagggacatttaacttgggttaaaaaattagaaattcattataattgtaaaaatttaataagttgttcagatgatggtactattaaattttgggatttaacaaatttaaatgattcaaatgaattaattaaaccaattaaaacacttaatgaacatggaaattttatcaattgtataacaattgctcaacctaagggtgaattaattgatgataatattagatgttatttagcaagtggaggtgttaatcgtacagttaacgtttgggtttaatgaaaaaataataagttttatattcactttctctattatacaaaaaaatgtacattttatattaattttagtcattacatttaaatttatttagtttttcaatccaacttttggcacattttttagaacagaatcttctcttaattgtaactgatttactaccttttagatcccaccattctaaaatatctgcaactgattcaatacatggattattacatgaaccacaagtttcaccatttgtaccagaaattaatgaattcattgcacgtttatagataaattcattagttgattctttccaattaagtatttcactttctgaaattaaatatttagatatttgtcttaatgcaagttcacttaattttggtacaaatggtattcttgattcaatataactttgtttctctaatctatattttaatttattatctgattccttccgtatctattttattattattccaatcattaaaacttccagttattatcataacacatatcttgtaatgttgtcaaacttctagataaaagtgatgcttgaactgatcttttactaatttgtttattactccttaaccaatgaattctactaaaaaatttaatttgtttatcatttgataaaaaataatttgttttaaattcatttgaatataatctaagtaagttttcatcgactgaataaaatttatcaactgatgtaaaaggtattaattgattaccagtgaattgctaaaacttcaagttttggtaaatttaatatattatgtggtaagaatttaaatttattcatacctaaatttaaagattttaaataaattgctttttcaatattacctgataatcttgcaattttattatttcttaatgtaagcatttctaatctttcgattaaaaaaatttttggattaattgatctaagattattatttgatgcatcaatataaataactggttttattataccatcattagtacaatcgatataattttctatatcacttattgattcagataatgaatttaattttaaatcatgtaaatttaatgttaaaattggatttgtcggattaattggttgatcaaagaaattttcaattgctttatttaaatttgattcaccctttgatgaatttttaacaacaaaataatttggttcatcatataaagttgggagaataatttgaaggtaattcatcattttcaagattataaccgaaaacatgaccatctctatcaattgcaaaatctattatataatcatctttaggtttaattaatattgaactatttgatcttttcaatgatcttaaattataatcatcataagaaactatcattctttgctttttacgtgttggttgttcattaaatgttgagccatgtccttgacagtggatgaattgattttttcaaatttggtctatgaaatttcaaattcagtttttcgattgtgaatttatttgagtttgtgataatggtaataaagttggtgatgaaggtattgttggtttaagtttaatttcatgtattattcccattattaaaggaaaccatatcatcaaatgcatctgatcttaaatgatcatgtttattgaaaaaatcagattgtgattcaattattggtgaacttggtacatcaaaatttaattgattaattggatcactactaattaaatcgtcattagttggatcattcattgcagtacttgaagtattgtgttcattatgaatcattattgacaattaaactattttcttgtacaatacagatgatgaactattcaatgcagaataataaaatttccccttcttctcaggtatacttgatgatattctattatgtgatgggtattcattattattataattgatattgttattgttatagttatctatttcgttattgtattcattattgtattcacttctatttcttttcatattagcaggtgcatttatattatgatcattcatcagtcattattatcatcattatcgaaatcatcattattgaaaatgtcattcctcttatttttatttaaattttgagatgataaaatttccaatggtggtacatgttcatcgatacgagatttatcaaatgcaaatggcaataatgggccaggcatttgtttggtttgtttatctaaagaacttgaaaagaaaaaagttacaataaaccattaattattatcaacagttcatcagatgttaattcagatctaataaatcgcctaaaaggggaaaaaattggtacgcgtctctattattggagggcattttatcggtgatttgatgggtttatttaattaatatagagggtatatataagatataagattaagatgcattttagatagagatgttgattagatttcaactactttaggacgagtaaagatcattgcacatgttaaacgtcttctatgacgaccatttggtttattatctgattgttgaaattcaattgcagattttggttcaggtatattaatttgattatcattagtaatttcattgatattagaaattgaaggactaggagatggagatggagttgagatggttcaggatctagatgaggaatatgatataatttattaataagatgagatttacgacgttctaatttcatatttttttcaaattctttagttttagaaattatctgtgaacttattttattatttataatgttaaattcatcttcaattggtataattggattaaaatcttttaaattatgatgatgactaatgaaaatatgatgcatttcaggacttgaacaatgtcttgatctaattaattttttatcggtatcatgctcatcatgttcatgttcatcatcatcatcatttaaatcttcgtaaattgattgagttggagataatggtaaaatttcatcatcattatcattatcgttttctgaatcagatatagcattctctggaacaaatggtggactgttattatcattaatcaaactattggtattatttttcaaagattttggtttataataaactaatgaaccaatcattggtattgaacctctattatttttcttaaatttattaaatatgaaattattattattgttattgtggttatggctatgatgagtatagttattataacgattattataatgattattatatgaatgacctatctgtagttgatcaatatcatcgagtgaagaacttctataaatatgaaaattatgaatattattattattattattattatctttattatctttatcctttgaagtttgtaaatcatctaatgaattattattatcagtaattgtagtattaatactgttaatactattatattgcatactttttgaatggtccatttgaatactttgacttggacaaggacttatagggactggagatagatttgatgaatcagtagagatattatcatcagctaccactagactgactcttctttgatttacagttgattgcatattaactgttaactttggtatatggatcaataagaaaagaagtgaatgacagagataaaacttttcaaagcagagtaaattaacttatcaattaatataaatgatcataaatctctgttcctgtttaggcgggtattttattttttttaaataataaattccagtcctccccgcaaaaatataattttttcaatgagaattgattgattattctttctgtaaaagggtataaaaggtagtatataaaatagtatacgataaataatactgtactgtggtttacttactgttatatggtagcaattgtataaatattatagaaatgtatatgggaaatagccaaaagccaagaaagggaaagggtcttgtgatggggcaaatgcataataaaaataataatttaaaaaataaaaagagggaggcgctctttctttttattttttttattttttttttgtggggtgagattttattatgtggtattattactattattattattattattattgtacgataataccgatattgatatagagttagtaaacattttcatatagttgtttagtaaaattaatttatacgaaaatgacactactgattatggtaagtttgaaaaatcttatacttatacttgccttaatcaaataatcattataaaagactcgatccaaagacctcaagcgaactttctagaaaatttcaaattttcaaatatcaaatttttacattgagtcgctcatgaagtggttgttgttggtatttaaaccttggacttttcctcctcttcttttttgagtttatttgattctcttttctggtttttactcttctgctgttttcttttgacattatcaactaacagtgggtaatcccctatatatgggtaaatcatatattttcatagtcaattgagattatatatgtcattatacacatcatttggttattatataatttttaaggaaattccagtgtccaaaatgatagaagtgtcaaaagattcagccgtgatgcctggcaacttttaaatcactatttccatttctttcagccatcattaaatcaaggattgctttggcttcagtatcattcagaattgcattaacctgcttacgtttcttatctgcatttaccaccggacatttacctagattatgagtatcactaccacatttccaacatccttcagcaaatttctctggacaatcgtaaacagcatggtttcttccacaaataacacaatgtttaggaactctgcttctacctttctttgatttaattcttttgttgaccttgtgattgttacccgtaccacgtttcttattaccaacattattgttaatactatcaacatgattattatttgatatatcatcattggatctaataccagcaataacttgtttatccttggtaatttctttcaatacagcttctttatttctgataccagcaaaagatctacattccttatgttagcttgcttgtggataataaacacttgataacctccaattaataccaaattcttcagcaaaacgttttacctcagatgaaacaaaattagaagcattaccacttaaaattgttccaggtactggaaaataaccaaataattgatttaaaaccatacaaactgtatccgattccattgaattggtaggaacagcaaaacaataaccactaacatactcaacacaaaccgacatatattgtaccacagtcagatatttcgttgggtgtaccctcataccttttactggtccaataaaatcaatgtgccatagctcaccaaattgtggagttttcaccttttgcaatggtgcaggcaaagacttaaaagaaataaacaaatcacaatgtttgcaattttttaaaaggacaattggaaaactatggaatttagcatgccactcagcaaataatttcatacattcatcaattttgataattgaaaatattttattttcataaacaaattttaattcatcattgattaattgaaaattattttttacttcattgtaacgactatctaaaacaccatttgatttcaacaacattaacatcctttccaaatcatcatcaaccaaaccattgaataacttctgatttcttttactaaaagggttttccaatttagcagcaaatctagtaactctgacagcattgaattcatcatttaaaacatctaaattcaattccggttgttaaaacacaaaaacgactcaaaaaattagcatgatttttcttactgggtaaatatttaataacaacaggataagtttataatgtctccaaaaatttcaagattcgcttgtctaacatcgaatgtttttgagaaatactaaccaaagcttgatgatcagtataaacaacaatctcgttcgaaagcaaaagatagttgttaaacaaagctaatagaattcctaataattctctttccaaaactgtgtacttagattgagtaacagtaaaacttttcgaaaagaaactaattggaaccgatttgacgtgtacagtttaaagttattataaaattaaccttttcgatgtatatttttaaaaagtttatagtttattcttacattgtgtaatacattgaaaaattttatttttaacattttgtacagttgaaaaagaattagctgatctagcttttagaccttgatataaaccaaaggttcctaaacgttgaaattaagtgatatcccttttaccacccattctttggataatattataaatataagtaaactgtattttttttctaatataatttcattaaaataactaaacatcgatttattcagaaataaatttgttcagcgagtctttagtaaatcgtttacttttccacacgcacctcttcgtatttgaaaatgttgacatgttggatcgacttttataataacagagagggcaatctctttccaaagcaactttacaagatacacatcaaatgacgaatcaaataccttcatttgattcttggaaatcctctcttgtatataacaatgacacagatgcaattgataactcatacttatctgttcaatcattagtttatcaaaatttaacaactattcataaacatttacattcattatctgataacactgattcaacttcaaatgatcatcttttatatatttacactcaattgagctcctttgttgattatattttagaaacttatcctaaatctaaggaaattaaatttttgtcaacaaatttaatgaatttactagctaaatcagttagttataatttattacttttaatgaaaaatggtcatgaaaaattcaatatatctttaattgatcttgttaataaattagtatctcctttattagaaaatgttaagaaactttcaatgtctaaaaattggtactcatcaattaaacacctttcaattatacttttaaaatttatcttcactaatttcaatggcttcttaaataacttgaaaaattcattggttactttactatacaaacatctctcaaaagcgaatgactcatataactcttcaattgaatcaggtaatttcaaatcaaattatttctcagatatgattcatttaattgatatcattttaactcatgataattcaaataatgtattagatgataaattatataatagacttatcaaattacataaatttacaactcaaaaaaatacttcatctagtggttcgactagttcagcatcttcatcttcaaaatctaacattaatttaacttcttcaacatctgcaaattctggtgcatcaaattcaaattcaagttcagtcaatcaatcttctttctatacatatccattgatctctgtgattcattcacattctatcatcacttcaattttaaaatctgatatgcatattgcttcaataacttcgaataaaaaaactaatatgaatgctacaaagtatttatcgtcattgaaagattatattaatcaagtattctctgatatggatactgatcataaaaaattgaaactttcattaactaaaaatttatcagatttacttgtttatacgttcattgttttcggttataatatcaatgaagtagattatgctttagaatcatgtttatccgttttattgaatgagtataaattaataaaaacttcatcaaatttaaaatcatcaattcttgaaacgattgttcaatttttatcaaaaatgaatttatactatcagacagatagaattcaaatatcaagatcttcttcatccattaattttgtttcattaaagttatttgatattttaaacattatctataccaaattatttgatttatctgtcagtttccctatcattgagaattcgaaatcaaataaaaagtcatctacaacagattcaaatttaggtagttctattttgattgataattccatctcattgaattttgcaattaaaactttaaatcatctatctttactacacaaattcctcatcaaagagttagataatgatgtcaataaattgattcttctttcaaagttgattttaggtaattcaaaatcagaatcaagtattaaaataaaatgcttagatgaaatcgtcaatccaaataatacagatgaagttgctaatgtttggtatgcatcgaatttattatccttttctcaattattgattgaaagtttaaatgaattcgttttatctgatcatggtagtttatcatctagtgatatcaatacagatattgcttctcagttggttcataaagttaagtctcttacattaaataaaaattttagattacgtgttattgcttgtgaaactttagtcaaattgttaaaaataaaacctgaattaagttttgaaataatgaaccaatccttaaacaatttgtccgcatctttccagaataaaacaatacaacaagaccaaaataaaaatcaacctcaagcacacacttttaatagtaactactccaactcatatttaatctcatcaatattgtctttttctcctcaagagtatattacatcagattttatacttgaaacttattctttatcattggactatttgaaaaaatttaatacatctgttgtttccacaaacttgtttggttcaacaaataatgattttttaatttccaatattgattatgaaagacaaattgtttcatggattcttttactgggtatttttaactatgtatcaaatgatgagaacatgaaatcaaactatgttttccttcaaaatgcaaatcaatttttagttctttggaaaaacttattagctcactcattaccaaatgggttcctgaaaattgatcctgcgactaaaacagtcactaacttgaatgaaattatgaagattattgaaatcaaaaaccaatcattagtttgtttaatcacatatattagctttttgaacttaaatgatagtttatctgatgaagatttaataagacaacttaatcaaattttaactaaaggttacggatttattacaacactattaaatgaacttaaatctttaaaacaaatcccagaatatttacttaattctatcagtggtggtaaattgagaatttttgaagcatatttgaaattattacctcatttaaacatcaaaaatgaaatcagttcatccatgttgattgaaattgttggaaatttctgtgatattgaaaagtttagatatcaatttaaagatccttttggtaaatatatcaaaacctccaaaaagaaagtttatattaattctatctcagaatacacaatttattatattgatgatggtttatggtatggattaactagtaaatttaataactataaagttgatgagttaatgattaaggataaatcaaagcaagctaaatcaaatcaaattgaatcggacattgatttaagttcctttacataatcaatttttaattgaatctccatattatcaaagtatttgttcaaatattagtgtttttgatgatactacagaatccagaagctttaactttttaaatcattcattactacatgattcatttttgttattatacaataactcttatgatattggttatactgatactatgaaatatccagtttctacagatactatgacagttgatacctcaattgaattatttgcaatttcatttcctcatttatcatcaaaaattcaattatctgttttggaatcgattagaagttcaattttttatcaaaccaaagaaagtaagtcaatcagtaataacagcaataacagaaaaggcttcatctactgatgaatctgaagagagtaaaatcaagctagaattttctctcaacttaagaaaacgtgcgatatctataaattcttcaattgcaatacacagtcttttaaattacatgttaagatataattctaatcatactgttaaacttagattacaaaaagatgttgctaatttgattgttgagactttgaaaaatattaattttgaagatatttatcttgtcaatttgaattcagaaagtattggtatttgttgttcattagttgaaaataaggacattcaagaagacgttttacataatcaagttacaattatcatgaactctattgctgaaaacacaaatccaaacaccagagcatttaatgtgaaaaacattatcacaattaacaaagtattccaatatagtaaatacttccaaaatcgtcaacacgatttttaactttagtattggatccacatccagtagttcatgcagcaacgttaaatgctttagatatttttcttaatggtaagtccaatatagaagtttcaaccgatttagcttatcaaattttaggtagtttacaaaacatatggttaagtgataattttggtttaaggtcaagtactactattgtttccaatgtcaattttagagagcatagtaattcggtaaacttgattgccaaaatattgagatcattaggttaatataacaggtccaatgatcagactatgggatgatgatcttaagagacaattaaaattcttgttatttaatttacaaaacttggtgacatttgattttgaaattttgatgagagaatttttgaaaatatttgaagagttattagtttatgacaaatctttgattgatttgaagaattacaaattattaactaaattattaattattaacaactttaaagattggtgttagtggtcattctttaagtaatttaccatttgataatgaatatgataatgagaatacaattgaatgtttcccatgtaccacaagttttaaattattaaatatgtcattagaatctgcattccaattattcaaattagataacgaacagaatgatgttattgattatgattttgaaaacttattatggcttgctcttgaaagtgatcctgataatgaatcaatccaaaatattattactattttaatgcaagactcgtgtgactctagtttgaataataaggctgaatggtataataaattgattaagtactttcaacatcaataaaagtgaattaaatcgtcccgctattaaagatttttgaaaagagaatcaataatggtggcatgtatttcagatcaccattgactacaacaactgctaaaataaataatgaaaagaagtccaaaactgaaaataccaataaggtttcatcctgtggatgatccatctgttgatactaatgaagataaggaaactttaacatctgagcaaccattatctacattaaatggagaaactgtgaaaaagtataatactaataatgacggtgatgatgacgatgatgatgatgatgaaggagaatattattataataggggagctacttctaataatgataaaataattcatattcttgatttatcgaatgagcaaataaattggaaattcaagctttttattctaggtttattaaatgaactattaacatattgtgattcagatattaagtttaaagtattattatctaaaaagatttcagagtttgttagaatttcatttacttcatcagtttcaaatttaatttcattaagagtttcatcattaaaattacttggtaaagttattgaattatattctgatatgaaagatccattataccctgaaatttcgattcttgatcaacaacaagcacaaattatgagtactattacaccatcatttaataaagagtccaatgtggaattatcaggtgaaggtattgttttagcttctaagtttattagtagtaatgttatcgatgtttccaaaactgggcgtattattaaaatattaacatcatcattagaagatattgcaaataatattggtaatttatcaaatgataataattcagaaagtaaggttaatgaaagttggagatgttgatattttaactaagaaatctgaaaacaagattaagatgtatatcttacaagcatggtctaagattttaattttgaatgaagctaatcataattctaacaattccataaatgaactaattggtacatacattaaagttttgataactttatgggtttattcacttagagaattttcgatgttaaaatatgcaaagagtgaatatgttaagagttataatttaaatgaaggattaagtttagaaatttatgaaagttgttggattgattatgctgaatccatatcaattacaattgagaataaagaatattatggatatttaagtgaaattatgggtgatgatattagtaaattatttgttaatatatttggattatgtttggagtatttagttaagaaatcaaataagaatagtttaggtgaagctaaagatgatatcagaattttgaaaacattaagaagattattcaaattaccattatcagttaaaattttatttaatgattatattttcagtgaatttgttgatattattaacaaattaattattgttgcatctgatatacaagaaattgaaattttgagtaatgttgatgaattaatcagtaatattttcaaagattattttgaagatttaactgttaataataaggaggaaaaatcaattgaagagatatattctgattttgataagttatttgaattattaagattgattattaagattatcaatatgaaattaacatttattagcaaaaaggaaatattagataatgattcaaatggaataatattagatgatagttatatcttattactaaagaaatgtttttcatcattcattgaaatgattagtttattaccaaagccaattcaaattgatttatattgtaatttattatacatgttagtattagttcatgaatttaagaattcacaattaattacaattttattaccagtttatcaaaaatgtttagggtaattataaagggttaataggagaagaaattggtgataataatcataataataaaaatttaaagaatatattcaagatattgaaaaattgattcaagattaagggaagatcaattattagcatttataatattgaaaacagtacctgaaattaatattgattctgaagatgttgcaaaaatcaatactataattattgaaggattaaaatcacaagagaatacaattctttcattatcaattcaaactgttaaatctataattaataatatttcaaatgattcaaataacaattcctcaattatattcaagggattaattccattattaatcaatttattaaataatgataatgaaggtaatactactgatccacgtataataattgagatattaatgacatttgttaaaaaaatagttgatatgggtgaagatgaaaaaattgaaggtagttatgaattagttattccaattataatttattttaatgttaagaatggatttgatgattatgttcatgataaagtactcgaattaattgaaattaatccaattaattttaagaagataattcaaagaagtgatgatgaattaagaagtaaaattgaagaattagttaataatggtagtaaacgtgatgaaattgtaatgagtaaagaatctcatattgaattaaagacattaggttagttttgtatatagtgtatagattataattagtaaagttttagaaaatagatacgcgtaataaaatagataacgacagagtatttgttgtgatgatgataaatattatgttttgttgttgatttataggggaatattgatgttttaatgattaattggatgtgttggtaagtatagtaattgttgatgtactttagaggtgttattgttgttaaaaaaagattgaataaaatctaacgggaagtaataacctagaatagttttgatatttttaaaataattgaagtggtaaaattagtaaatttttaatttttcaaaaaaccttaaaaaaagacactaaatacaaaggttatataatataaaagaaatataaatgatatcattaatattttctagctaatttaatttcaattgattcaacattaccaaaataattaccaaaataggagataaaacaatttttcaaacaatttaaattttcatataatccagtaaacatttcattaccattaggatttttaattccatacatttgcattaattttctatttaattcaataactgataaatctttttgtaattcaaaccaaggattaattaaaaattcatttaagaaattttcaagattataataaaattcaaatccattaccaataattaatttctcaactaataaaatatcataagactcatctaaattttgtgaagtgattaaataatcacaatttactaattcaaatgggaattgaatgtgatgaagttgaattaattaaattatcgaatgaataattggagaattcattataatcaccaatattattttcatttgataaaaattttaatctttgattattattaaggaagaatgaagatgggaaaaaatctttattatcaatacaaatattttgtaaataaggtgaataattattatcagttgttgaatctgttaaatgtttgaaaattttaacttgatgcagtttcattattaattaaattattaactcttgaaaggaaaagtaataaagaaattgtaattattatgaaattaaattgattttttcaataatttacaaaatgataatgaacatgaagatgaaactaattgagctgctgatattgagattaaatgataaattggatacattgatgaatcaattgaaggattttgaaatgaataaaatgtaatataaataattaatggtaatttatagataaataattgatatttattaaaacctaataataaattaattaatgccaaaatgaataaaatattttgatttaataataaattttcaatatgataagcattaaaatttgataatttaaataatgataatgaattatatgagatataagttatttttgaataaaataatgaatcaatttgtgaaataaagaaagcaataaagaaaatacaacttaaagttgataatgaataaatcataaaagttttagatttactaaaattattctttaaaactgattttggtgaataaatcaatgaattaattaaaatatatgaatgagaatggtaaaattaataaaattgcagatggataagttgaaaaagttgcaattgaaattaaaattgttgcaattgtataatatttattaattaaaggaattgaaattctgtaaaggttaagtaagatatttgttcttgaggataaatcatcaacattttcactttctttcttattttcaattttattttcaagggataataactcatcatcaatacttttaataaatttttcagtattaaaataagcaattatataattagttgaaacaattgataataataatgcaattgaattaggtaaaattgaaacagatgcttgatacataccaggatttaataattggaaaaataaaaaccaatatttaatatttttatttaagaattttaaagttttagataatttaatttctgcaattgtaaataaaattgataaaataattctaattaaataaatgaaaacatatggttgtaaatttaaaaatttcaaagggtaactgaataatgagaatggaattaaataaacataggaaccagatgaattaattggatcatagatagttgattgtttaccaaataatctaattaagaaatttaggggttcccaataattataaatttcaattgaatcattcaagggagcataaatagctgcatgaagacgagcagttaatagagcggtgttaagaacgtaatccattgccttttagctgttcaagggggggaattgtagattgatttgttataaacagttgtcccaatagatcaatatatcgatataataataataataataattaatttcatgttagcgacgatgcgtcgatccaagtggggaaggtattatattagtattagtatagtataagatagtatagtatagtgaagtatgggatacaagatacagtgaatagatacaatcactacaatggaatagaacatttgtattgaataataaataactataagtgtataaaagaattagaataagagtaagggttaaggagtacttgattaattatatctatcctttgaatttgcattccagaagagaccatctttatcaacttgtttaccaacaagaactgtatttggaggatgaaattcatttttatcactataagtatgtttaacttcccaccaaggtacatctttcataatttcagcttctctattataataagctaatgatcttcttaaaatatccctatcttgttcagcttgtaaaagtggtaataaattaattctagcttgaagtttctccctagaaatttcttgttgttctctattaccttgaataattttataaaatccataagatgacattgtaattaacataccaagccaaatagttggtctaaaacctcttgaaggaagatttctcttccattggatcttgtcataaccttgaacaggtggtaagtcttgatgatgtgccattggatatatgaagtgtattataaataataagataccatccaataatagtaataataccttaccaatgaaaatttaaaatcaactttccctcactaaataaaatgtaaaataatttattatggtgtacgagtgtctgataggcattgtatattccgatgtcttattatcagatgattatcttaatgactttatacaagacactctcttttattggcaatgacagttaaattaacaactaaggaacaaatcaattcactattagacaaatacgatactttcctatttgattgtgatggtgtagtttggatcggtaatgaattattaccttcagttaaggaaacaatggaattattacaacaacatgataaaaaattaatatttgttagtaataatagtacaaaatctcgtaatgattatattcataaattaaataattttggtattttcaatattaatgttgatcaaattgttaattctgcttattcaactgcaacttatattgaaaaagttttaaaattatctaaaactgatggtaaaaaaatttgggttttaggtcaaagtggtattactgatgaattaaataataaaggttatcaaacaatgacatttgatgatttaaccgaaaaaattccctcatgatgaattaacaatggataatattgataatttaatttttaaagatgaaattaattgtgttgttgttggattagattttaatacaaattatttaaaagttggtattacaatgcaatatttattagataataatattccatttattgcaactaatattgattcaactttcccatttaaaaatactaaattaccctggtgctggttcaattgttgaaattgttaaatttgcttcaaatagagaaccaaatgcaatttgtggtaaaccaaataatggtatgatggattcaattttaattagtaataatttacaaaaggataaaactttaatgattggtgatagaattaatactgatatgaaatttggttttaataatcaaattgatactttattagttactaacaggtattgaaactgaagaaagagctttaaatgaaaaaattattacttattatactaataaacttggtgatatttatgatttatcaaaataataattatatagattatttattaaatatagattattaaattattaaattataatatattatacatccgagcttatattattatttaaatatatttaaatattgaaacgcttattgcaattacaattaaactttatctaattactatactattgaagatgtcaaattgtgcaaaattcccaaagatattaatgattcaatttcaatatattaatacatttatcagaattcggtaactggataagagaaatcaatagattattaggtggtatcaaattgtctaagcaaattgctaatcatgttgaggcaaaaattaaaactaatcgtaacagtgttcatgttgttgctagaattctagaaaaattaaagattccggtcaatgatatcattatgcatttcaaattaaatgaaatcagtgctaacaattattgatattgttagaatcaaacaaactattgaatccattctcgttggttcagaaatttctcaaaccccattcaatgaaaaagtcggttgtgaaatcattattaattcaggcaagcttccacaatattttattaccacatggagaacatcaaaggaagattataacctatctcaactttaccattcaattgaacaattgattgttgatattaaccgagttgagaaaacaaaaggtgaaacaaataaataatatcgcccaccataaggaaaatgatgaaagtcatggaaattatgttagatctaagtactattgatattgtagactttaatcccacaatacaagagattgcagaaaactaaaggctaaaaatgaagcctagtgatcaagtgtatagtactattaagtactaataccacttgatggtaaagaagaagaagaagaagaagaagaagaagagtgaaaagaaagagtgaaaattttaatattttaataatgatgtaatgacatagtataataaatttcgctcttataaaagtaaaagttggtattgatggatgtgtttcgtatatagtagttctttataataatatagtatagtatagtataagtataataaacaatcataatgtcagtaacacaggaaacattagagactagtgaattaattaattggacaatttttcaagaattattattaatggatgaagatgaagaaggatttgcattaagtttagttgaaacatttgtacaacaagcaaatgaaacatttattaaaattgaagaattaataaattctaataatacaaatgatgaaacattaggagaaattatcacaattaggacattatttaaagggatcagcggcagcattaggattaaggaaagttcaagaacaatgtgaaagaattcaaaattatggtaaaaaggattcatttgataataatgaaattgcaaataatgcaagggataataatgattggattaaatgtgttaatgaagcatatagggaaactagaattaattttgataaaagtaaattattactgtcacaatatttccaatcagaattataatcatggagagggtagttaggtatagtgtatgtatgtatgtatgtatgtatttatgtatatattaattataatatataattgttataaaataatataaaatagtattatagtattattaagtattattcttctctttaatattattctctataaaggaataaaccaatataagagagaaagataatataccaaaatatatacagatagtatttaattgattatctgatatcattgattgatggaaagatagttgtataaaagtgatatatcaagagataataccttattccaatataatatacaaacaagtaacgtgtactctaaaaagactaataatataatataccgacccatcgacttaaattattacgtaatataataatcatatacggagtaccggagtatttaaaattaccacattattttaatttaataatttttaacttaatatggtaattttaaccagtgaatagctttccaatttaattactgtcttttctttctcttgctttctcttctttcttttactttctcttactttctcttacttctctttacaacaacacactctctcaatatgtctagaaaattaactttcattccaggtccaattgaattctctgataatgtccttaatgcaatgtcaaccccttctcaagctcatacttctcctgaatttattaaagttttccaatctgctttaattaaaactagaaaaatgtttgattcttccccagattctcaatctcaacctttcattttatctggttctggtactttaggttgggatttatgtggtgctaattttatctcttcaccaaatgataatatccttgttttatcaactggtttcttctcagattctttcgctaattgtcttaaaatttattcaaataatgttgatataattgaacctgaaaatttcggtgattcaactaatttatctactcttgaaaataaattatcagaaaaatcttatcatttaattacaattactcaaactgatacttcctctggtgttttacaaaatattgaagaaatttcaaaaattatcaaaaaatcacaaccaaatgctcttatagttgttgatgctgtctgtgcaactgcttgtgaaactttaaaattcgatgcttggggcattgattatgttttaactgcttctcaaaaagctgtcggtgtacctgctggtttatcaatatcaattgcttctaaagagagcaattgatattgcaattaataaatcaaaacctcatgctttctttactgatattaaaagatggttaccaattatgaaagcttatgaatctggtaatggtgcttattttgcaactcctgcagttcaattagttcatgctcttaatgtttcattagatgaattattatcaattaatgatggtacaattgatgaaagaattcatttacataaattagcttctgatgaatttaaaaataaattaattaatcaattaggtttaaaattagttccaaattctttagatattgcagctcatggtttatcagttatttattatcctaataatattaaaggttctgatttattatccaaaatggcagaaaatggcttcactatcgcttcaggtatttataaagattataaagataaatattttagaattggtcatatgggtgtatcagcaattggtgaaagaaaggatgaattaaatcaatgttttgaagctcttaaattatcattatctcaattaggttatgaaaataatatcgtaatattgtaaagtaatattatatagattataaaattataaaattatacacactaattcattatcattaacatttcatttttattatttgaatttaattgtgggaaattattcctctctaaaaatgtacttaattcacctaatgtaaaatcaggatataaatttaaaaaattttctaattttgattgaaatttttcagaaagtaaagtaaatttatttaaacctttaaataataaaattaataaaaatgttgtcctatatggatttttacattttggtaaacatttttcaactgatatttgtaaatgttcaatatatgttaaataagttaaaaatcctttctttaaatcaataaattcttcagatcctttaatttcaattattttatcaattaataatttaatcatatttgatttattttgtaaattaattataatttccaaagttttaaatgttgttaattcattcgattgacatttataataaatttcatcattaatatcacaataatctaatatccattcctttaaattttgatccattctatcataaaataatgtataatctttaatattaagataattattaccttgaaaaattatccatgaatttttaacattttcattaattttcctatcaaatttaattaaatttgttaaataatcatatttagaattttcaattaattttataatttcatccctaattgattcaaatggtaaatattcataaaatttaatattaaattcataatctaattcctctgatgtcatctctagtggttctaaaaattctttatatccaatacttatttcattttcttcaattctagtacaattattatcaatatatttaatacaatcttttaaataattaatatcatttggtacattattaaattcccaatatcctccttgtttaggtctcgtatatttaactctcattaaaagtatatctttaagtaaatttaaatcatttggtaaatcatcatttgttgatggtggtggtaaattgtgttataattgtattattgtttataattgtttgattttcattaatatcaagcatttgtaattgtgaattaagactattagtgaatggatccatgattgtttgtctttatatttgtaacatttattccattgaataactgaattcaagatgaatcaattatttatgctagaactcgattattatttttttttttacgtaagttataggaaaaatcataaacagcgttgagaccggattatacagggtaagatataaaatataagatataaaatgttaatgttaatgtaattgtaaatttaaagagcaatataataataaatgaataaaacacattgttgaaatgtaatattaatttatcaactttaagttgataatgggaaagcaccagcccaattagaaatttcattctttaaattatctaattcaggtgaaccatcagcaatttttttcttaaaatcttttaatttatttgcttcaattggtaattcagattgaattttctttgcatatttaacacttgaatcaatataattaacaattttaacaaaatcttcttcacttaaacctctagttgtcattgcaggtgcaccaattctaacaccacctggaactaaagcagatttatcaccaggaattgaatttttatttaatgcaatattaattttttcacaaactgcttcaactctagcaccatcaatacctttatcctttaatgaaactaaaaccatatgagaatctgtaccatttgaaactaatgaataacctaattttttaaattcattttctaaaacttttgcattctttaaaacttgttcttgatattctctaaattcaggtgttgcagcttgctttaaagcagttgctaaagctgaaattgtatgattatgtggaccaccttgatgacctgggaaaactgaaaaattaattggattttctaaatcataataaatttctttaccagtttttggattaattgatctaacaccttttctaaagaaaatcattgcacctcttggacctcttaaagatttatgagttgtagttgtaacaatatcagcatattcaaaaggtgaatggaataacacctgcagcaattaaacctgaaatatgtagccatatcaacaactaaataagcaccaactttatcagcaatttctctcattcttttataatcaattaatctacaataagctgaagtacctgcaactaaagttttaggtctaaataaaattgcagttttttctaacatatcataatcaattaaaccagtatttaaatcaactctataaggcattgtttcaaaataagttgaaactgctgaaatttttcttgtatcagtttgataaccatgagataaatgaccaccatgaggtaaatcaagacccattaatctatcatgaggtttcataattgcttgataaacttctaaattagcaggagaaccagataatgattgaacattaacaccccatttctcaggatctaaatggaaagcttttaaagctcttgcttgacataataattcaattctatcaatatgttcattaccaccataatatcttgcacctggataaccttcagaatatttattacacattggagttcctaaagcatcgaaaactgcagttgaagtaaaattttcacttgcaattaaatcaattgaatgtttttgtctatcaatttcatcttcaataatttgtgcaacttcaggatcagtttcttttaaatgacctgaaaccattgctctatgagcaggagataaagcatcgtgtgacataatttgtattattagagttttgtttaattaagtaagtaataatttctaaaagagaataagatagtacaactaaataatataacttttaaaaagcaagaataatcaatcaatttataaataaaattaaaaatgattcccctgttacgggtgttgaaaaaataattaaataattaaattaactatgacacattgtctattgtttaatttaataagagagaagtcaaatttttattttttatttatcattatggtctttgcacgtgactttgggtcgatgggtcgatgggatcgatgacaggttgcatgtctttattattagggtagtactacatggaatcatttaattataagatttttttattaacaaattattataaagataatatagttatatggattatagatttattgttagattaatttaaatacatacatacatataatgtaatgtaaaaataacttaacgataagatttttggaatcttgctcttgcaccacgaccaccgaatttctttggttccattcttcttgcatcagcaactaataaagttctatcataagaagcgaaaactttctttaattcattctttgaagattcatcaacatattttgcagtataagcaattaaaccttttgcaattgcttgtctaattgcataaacttgtgaaacgtgaccaccaccagtaactttaattctaatatctaaacctgcaaatttatctaaaccaactaataataatggttcataaactttatgtcttaaaatttctggttcaacaagtgtaattggacaaccattaactttaattaaacctttaccttgtttaacatgagcaacagcagttgcatttttcttcttaccaaatgtttggacagatgggatcttagcgacgacagcagacatgacctgataaatgaagtattaatcaagagagaatatataaaataatgaataatattaaagtagtattgaaattaaattgaaaaattatcatagaaaatcaataagacaaaatgataatatagaggtaatacctatatcctctcactatactataatcattactacaatactttccctctctcactgtataaatttttcatttcctcactctcaattaaattaaaatttttgaaatttttgaaatttttctctctttatcacagtcacagtgtcccaaaagggtaatctgcgcgacgcactgcactttgttgtctcaaaagggtagcaccccctcgcaccctctacccgcacttttgaaaatttaattttacccatcatttgccgggaaactttacttttacccactaatgctacccatcatcccccgctcagtggtgaaatttttttttttttcttcatttcagtttctcaatattcattattttctatgtatgatgatattactgattattcttgtagattttctttaattttttctaacgtttaattacctttttcttgttattattctattagcaacaactccttaacaatgggtacgtatactacttatcgtcttaaatcaatatattaatatattattaaaccataatgaacaaatatactaacataataataatgaacattcaattaatttttaatttaatatagctattcacaagaaccttccaattcttaagaaccacttcagaaaacactggcaagaaagagttagagttcatcttgatcaagcaggtaaaaaagcttcaagaagatctacaagagctgcaaaatctgctaaagttgcaccaaaaccagttgatttattaagaccaattgttagatgtccaactattaaatataacagaaaagttagagctggtaaaggtttcactccaactgaattaaaggctgttggttatactccaaaatatgcaagaactattggtattgcagttgatttaagaagatcaaataaatctgttgaagctttccaaattaatgttgaaagattaaataaatataaagattctcttattatctttgataaaactactaaaccagcaggtgaagaacaagtttcaattgaatcaactttccctgttgaacaaattgcttctgatgttactccaagagctgttgttgttccagaagaatctgcttacagaactttaagattagcaagatctgaaaagagatataaaggtattagagcaaagagagctgctgaaagagcagaagctgaagctgataaaaagaaataagtttagttaatttataatatagctttatttaaaatataaaaattatcctaatacattttctatagtaatataaattaaaaatcttttgatataattcaagtagtatacatgtataatacatttgaaagcatttaactatcatttcattatattacatctacgatctatatctacaatctacattaaataatatttttgtagcaaattattttatcaattaatcaattaaaaaattttatattctatttataaaaatacataaattcaagttatttaatcgaataaaccgaaacccatatcatcatcggattcttcctttgcttcttcaacttcttcttcagctgcttcttcagatgaacctgctgctgcacctgatgatgcacctgcagctgctggaccagcagaaacgttaaaattaactaataatgattgtaaatctttaccttctaaagcttttgcaaaaattgatgcccaaattgattcaaattcaatatttgcaccttgagttaatttaattaaattttcagtagtaatttcaatatcagaatctgctaagataactgatgcgtaagctaatgcggtttcagtagacatattttgtttaatttaatgtggaataatcactctttaagcaaataaaaattgcagactagttccttaatttcaatgaaaaggtaaaagataaataagaaatataataataaattaatgttaagaaatattcaatagtaagtaatttttcaatttcctcaaccttttttccaaaatgaaatttctattatgtggaaaattatataataaaagtgagggtttcccaatgcggtaattagggcttagtggtcacgtgttgaaagatttgaaaggggctcgtcaacattattatctatttaaagattaacatcgattaattgctagttctagtttaattttaacaagttataaataaataaagaaagaaacaattataaataaagaaacaattataaataaataataaataatacaataaatgatctagatcaactagtttattgcaataaatgcaccaattgctgcaattgcaggaacaataacaccattaacatttaatgatgaacctgaacctgaatattcagtactaacagttggttcagctgatttagtttcactagttgaatattcaacaacagttgttgaagatttagtagtacttgaaactggtttactattatcattttctctttcactattagaagtaatagaaacagatgatgttgatgatgctggtttagtaattgaaactgatgatgattcagtggtacatggttcagtaactgtaatggtaacaccatcagtgacagtggtataagtagtgtatgaagttgctgatttggtagttaagacagatgattcagtggtacatggttcagtaactgtaatggtaacaccatcagtaactgtagtataagtagtatatgaggttggcttttcagtacatttttcacatgtttcagttgcagttgttgtattcttttcagtgatagttgaagttccagataaattactcttgcctctgttattagcatcaatacttgaatcagatgaagttgaaacaattgatgatgatggagcttttgaaggtgaagcaactaatgatgatgatgatgatgatgatgatgataatgatgatgatgatacagctcttgatgatgatggaattcttgttgatgaaccaattaatgatgatgatgatgatgatgatgatgatgaaatatcacaagtttcaccgtgtggtaagtttggtaacttgatatgatacatcatatattgagtatcaacatcaaccccttgatcatatttaattttaccaaaattcaaataaccatcagttgtcttgtaatcattgtcagaacctaataaaaggaaatattcatcatttgtacatttaactgggaaaagatccatactttcccatttttcattaattaatgaaggatcaactgcaccaccattatgaagaccaaatttagataattcagttggatcaattaaattaataaatgaataataagttgcaggtttaatacttgaatttaagacaccctttttagttgaaattttttcaccaacaccgtcatattgaccaacaatattatcagcatcagttaatgaccagaaatcaacgtgtttaaagattgattcagtaccatcttcatccaccattacctaaatgagaatctcttggtaataacataattaaattttcattaataactctcatttcactttgtgatgcagtctttgttttaccatcagctgcaggtataagttggtaaaacaacaacatattcaccaactaattgaggtggacaaacagtaatatcatattttcaataatctatcattaaatctactctttgatttttctccaccgtcttgaactgttgcagattgtaaaattgtaaataaatatttaccgtcaggtgtaatatccataccttcataacctttatttccagttctaccatcttcatttggtgtaacagaatatgatggatcagtccataaagtattatcagatgaaaaaaataattcaccattaacatgaggtaataaagcatcaggtgccataatataatcaagcatattaccatttgaatcaaatttaaataatgaaggaccatattcatcactaatccaaaaaccatttttaattgaaccattaattaaagtaattgcttcagcatctaaagaaattttagttgaaaaagtttcattaccttttggaattgtccaaccatcaccttgatatttaacagctggcatttttaaaccattataatcaattgttgtatttgaatctaaacctgtaaaatattctccattaacatcttttaataaaattgtatctttataattaagtttaatattttcagatgaagaggaattttttggagtgaaaataacatcaaattcatgaattctactaaaagtattaacagtacctttaacattccaacctctatcaggtaaaccatacattgtaaaatgataatcaccatttgaatcaatatataaagttgattgatcaacttgtaaacctgaacctggtgacattgtttcaccatatttatcaacagcatttgatgcaagtttaccaaaacctaccataccaaaagattctaaagttgtaccttcaatatcaacactgacataagccattgctcttgataagagtgctaaaaaaacaattttaattaatgatttcattgtttaaaaaaaatgattgactttagttagtaaataaaaattatcttgcttaatgagtatattaaattaaaattagtttctaatatcatataattggaactaacgcctggtatttatattcaaatgcattcaaaacaaaacaaatgaaaacaaattagaaaagcgaataaacgtttataccaattagtccttccccaacaataacattaaacggtaatcgttcatttcacgtgggagaccttaacactgcgttctctctttttttatgttatattacttacattatattggtgccctatttccaaattccatatcttatcactattttaagcagtataatgcaaccagtataataatacaacttcaacttcctagataatacacgtggttatcagttttaagtttagtaccgtaccttaatcgtttcggagttctcgctgacatattactatgctgagccaccaaaaccgttttttttttcaattctattttctattttatctatatatttgcacacattttatttatttatttacttatttatttatttatttatctatgtaacttttattgggaacttaaagacactgtattttttacccttctttatagacacttgaaaatgaaccatataatacctattgattaaacaactttcaaatgttggtatcaaacataatgagctcttatccctctgtttaacactcattgctaatggtattttgacatttgcaacatatttccccctatcttcatcatacatccatttattacttaaattaatagtttcttccagaaatttaaatttagggacatataattcctttactgataatttactcattgcattaacagaattataaatatttctattaacttgtgtttctttaattaatcgttttaattcattcaaatatgctgtgaattgtctacgaatacttggaatagtatattgtatcaactgttcatccattaaaaattctccatcaaaattgattggtaatgcataattagaaaatacgttaatagtctttaatttagatgttatattaacacttgttgataattcagccttatttttattacctgccttacatggttctgttgaaaattcaaattcaacaaaacaatgttcttgattaacattcctcaaactaagtaacgatgtaactgtacttaaactatctggactatctgagtcaatagatgatattggaacacttttatttcttccattttctattgtgttacttataaatgaggtaagtccattagaccttgatttatgtggatttaatgaattggatctacccttatcatcattattctgttcatttttgctgtgttttttcttttgtttggatttcaatgcaaatgatctaatagattttatactactatccctagacattgatgctttaataacaatctcaccgcctgatcttccaaaaaaatctttattcatttcaatattatcataatgtaaaaatgattcaccatcactcctaataatctctggatggaaattagttgagctaccattcaattgtttgtatttttttgtctcgtctgcttctaatgatgcaattatttcatcctgttctcttctatcaagaattccaccttcttgtaattgtctcttagttttcaattcatcaatatattgagaaacaagtttttcaaatttaattatctgttcatatgttctaatattagtctttatctctctatctacaatttgattttcagcaaaatgttcattttcactacttaaattaactctgaaataaaatttctctatatcaaacataacatacttattattgatactttttggtattttcctaccaaatttttcagcaatatccttatatccaatcatttcaactttaataaaatatgatattgattgctcctttaatgcaaaatcatcaactataatgggacttccataaaccccatcgcatcttttatatcctaatattggatcaatttcaagatcttgttcagtatcaccaattgctgatacatcatatccatatgatggtaacatatgtaaatgctctggtatttgatccggacaattagtatctaataatgagtatggtaatttgaatgaaaaaaacttcttatgaatagtatctggttcaatacatctattttctgtaaatccaataactgtattatcattgaaatctttttgtgaaatacccttaattccatgtacttttgccaatatatgacccgtatggaaacaagcatttaaatcataagttttcaaaaaacttttacttaaaatttttctatcttcagttgttgatccacttgcaggtgttctcatttcaccttcaagtgaaactaacagaatttcaaatggtaacggttcattgatattagatttaattgtaacataccccgttattaaatcacctggtttatattcggttaataaactttctctttcaaacgatttaccaatcattggtaattgtttagttaatgttattttaatatcaataggtaaatcaactttaattaaactatttgtattattaagtaataatgatttaggatttcttattggatctatgtcaatattctcactgggattaataactctattggatcttaattttactagttcagattcataatcaggtaaatccgttgaatttaaatcatcatgtagtggtctattaaacatataattatgcatttgaaatgatggtaaaatatcttccagtaatgaacttcttgcttctgaatacattgatctatcatcattcgttattattctactcatctgactttgaggtatttgatgatgtttattagtattattatcaactgacatgatgcttattttctgtatatcggcttatccccgttattccctgtgggagttatattatcctttttacaacaatttgaaaaaaaaaatacaagaatggcacaaaccggaaaaaatatatagtatgatgttgttaatgtacagatattttattgtttatagaatgtaatatacagagagatgaaaaagtattgatggtttgatgttgtaaaactgtatttatctgaaaaatttccaattgttcaactgattacaaccactcaaaatttccttttcgggtaattttcagagcgcggttatcccggttgattcttaaatagcctaagcctatatccagccttatacaacagacaatgggaaacacatgttaaccttttgctttgattttttgacacttacctcaatatccacagcatataatctacttaaatgacattgttgaaatgttggaactaaacacattgctgataatttatcaatattttttaaatcaaaatgtaatggaatttggaaatcacattcataaatatttgaatttgaattaaatttccattggttgtgcaaatcaattgtttgagtttcaaaaacttttttgattatttgttcagttgtatataatcttgaaagtccattaactttattataaatacttctagctaatccagcctctaattcttttaaaacttcaactaattgatgataataaaatgagaatttttttctcatattagataaattaaaattatctaaacctccattaaatataaatttattatcaaatgtaataggtattgggtatggtgattgaatattaaaaattttcaaatttggtgaaattgtgattaaatttggtaaataaacctttgatgaatttctctttgatgaaatggaatttggtggtttaaattccaaatgaatataaatattttcattatgaatattttgttcagtatatgattcgagtgatttagctgatgatacaggttttaaattcaatgaattcagtgatgtaaatgattcattatttgatcttaactgtgatgtacctggtgttgaagttgaatttgaatgtaaatttgataaacttgtattagaaaaggatgtatttaaattagttaaagaagttgctgatgctgaattcgaagatactggtgatacagttaatgatgataatgatgatgtttttttccttgaagtgaattgttttggttttagggatttgatttgtgcatttttatgcatactcaaactaattgataaatcaccttcaactttattaaaaaaatcttttacaaatgaaatgttctttaatgtagtgaaacctgtatcatcagttattgaagttttagtatcactcaaagttggagttaattcagatgaattaagtggagttgattttttagatgatggcaaacttgagaaaataatttcatcttgttttcttggatcttcaatacctatatgttttaaatttgtacgttccaatatttcatttaacttatctgtaaccattttctctataatttgaatttgttttgcagttgaaacttcaccatgaggattatcaattaattgttcttcaaaacaatttgaagtttcaattctaaagaaataatcaactgattttaaaatgataaaatcaaaattatgttttgtttcatgtgtatagaattttttataaaaatccaaatttctaccgataaattgacatttaattgaataagaaattgcttgaccttcatttgcaaaatccatacttctaattggagatccatatctatctaatctaccataacctaataatggattaactttaattgatttcccataaccattaaaagcagttctatcaacaccaaatgaagggggtaattttaaatgatttggtaattgatcgaaacaagaagtatcaagtaaataatttggtaatttaaaagcaaacatttttttatgaactatatttggcataattgttctatcattaccaaacccaatttgagtattatcgacatcatcttgtgttttatcaaatgaaacaccttgtaaatcaatacaaccataatgaaaacatgcacttaaatcataagttttcaagaatttttttttaataatttcatcaggatttgttggatgaggaactaataattccccttctaatgataataattgcatttcaaatgggattggttcattcgatttattttggatcagtacataaccacaaactatatcaccaggtctatattgtctaagggggttttctctctctgatttaacattcaatttaggtatattcttagttaaaaccacttgaatatggattggtaattcaattctttgaaatttttcaagattatttaataataaaaggtttggatttttagttggatcaacaaaattatttggatcagttgttaaaggtggtggtgggcctaagatatcatcatcatcatcattattgttattactattattattatattattattattgatggcaacttcttcttctacttctccatttaaagtatgagtatgagtataagtatgacaaattgtttgcatatcagaatcaagatctgcatgaagtggaggattagcaaattgatttgtaattggaattacttttggtcctttattatctaaagttattccatcatatgttggaggttgagataataaagcaatattttctgtatcataaatagtacgattaaacatataattatgcatttcaaatgatggtaaaacatcctctaatactgaactttcatcatcattatcaatagtgttattattattatcaatttcggagtgtaaattattatttctattaatagtactatcatgagacccatgagagtttaattttggattgattttcaaaggacacttcagacaatggattccccttcattgtgaatgatgatggttaataaagaagggagtaatgaagcagatcattatacaaagagtgtatcgatgcaaccataattaaacctgccacactgaaaaacacttggtgaaaataattttgacagcctttcactgagagggagtcattttttattactactatgtttacgtaaggtgtactatatataacggttatatccacggttgttagaggttatatattatgattggttattggttaaatgatcttaatgattttaatgatatattaatataataaatgcactgcattattaattaagttttataaaatatactaaatattaaataatgatataaatctaaagttggttgaaagctttaagaccacaatagaagaatctaccataagcatcttcaccttctgccttgaaagtaattgtacaaccttttttaagatagattgtatcacctttctttggatgaatggtggtaccagtttcatcaatcataatcatatcacccttagtttcaagacaaatcttcatttcatcgtatggataagtataaactaatggttcacctggaacaactttgaaaaaacctgatgtaagtgtatgttcagcatcagtattctttgttgtcataatatcaccaagataagaattttctgaaatttttggtggaagcacatcgaatgctttttcagttggtaagaattccattggcatttttattagttgattatttatatgagtttttgttgctatttaaaaaagataataattataataatatttaaaaagtaagatacaataaattaaaattatagggaacattctattatttatagacaactttgatatctaataacacatatccaatgtaaatctagcaatggcccaaataagatataagatccagtaccctgtaatcaaattaatcatcattgataattttttgaatttaaacgttatctctcgcattgattatcctaaaagaggtaataacgcgcttatctaagggtatcgttaaatttgattgagccctcttttcccataatgggaacttcatcttcttttggtatctttatccttcgatgtagattataatagatattggagagatgctgaaatacttgattaatttactatttaaacctataagcatccttttattttaaattgaaatgtaatacttatttcaactaactttatttaatttatcttatttaaaacaaaaaaaaaactttctttaacacacatacttaatcacatacaatgccattatatttcaaaccaggatctgacagttatttttctaaccaaccacctgcaattccttcaccgggtaaaaattcatggttaggtgacaatcttcattctgatgctccaaaggataaaatactttcatcaggtttctataaacaaggttcaggtgaagctttagtttatgcttatgattatgaagaaatgaaagtttgtgttgaagttcatggtaaattcactgtaagtgatgaaactggtcaatctgttgaagtaactcctggttccactttctatttcccaaaaggttgtacaattactttcaaagttgaaggtactgatgaagtcccagaggaagaagcttatgcacttaactggttctgtggtttaagacctgcagattctgcataattttcttaaattttaataaatttgatatttattttagaatcagtgtttcttaaacatcttataaatctataattattataattattatataatttttatattctttgtctagtacaattgaataactgaatattataaaagaaagttgtaattaaattaataacaaaaatttaacaataagaatttcctaattagggcgtaatgaaaatttaaaaaatttaaattttacttacttaaggaaagtcaattttgagtgtcacctagtaattttttattgaaatagaataaatactggtatatagatactgtacataagggaaatgcactatatatagggtacttttaacaataattatacataaatacaatctagatactaaataatgactaaaatagaagaaaatctcatgagagatgataatgataataatactattacaatagatgatgatcaaacagagcatgatatgaatatgaatattaatatcagtaaaactaataactacaatgataaaacaataaatggagtattatcattatctcatattgcaagattaaaatgtattaattgtgcacacttaattgatgatattggtactgcaccttatcatttaatcgaaccaatattaatgaaaaaaactgcaaaatctttaaaacaaatggaaattaaatcaccacaaattatacctgaatctgaaaaactatgggaaactttacttaaaagagatttccctgatagaccattaatacaattttcaaatttaaataatggtgaaaggattaaaatgttatcaagaaatatttatgataaatatttaaatgaacgtgaaattcaaaggaaaaatgctgttggtaatttaaaacaattaaatcaaaaattaatggcactaaagaataaaaataaagttattgcaattaataaaccattgccttcaacaaaaccaaaatttatatctaaaaatcttaaaaatcaacaatcaaatacaaaagttttcaaaagtagcttattacaaaaggcaagagaagttaacaaacaaagagtacgaaattatacacaagttaataataacaatatattgagatcaatggatagacctccaataatacgaaatagtttgaatcctacaataaattcgtctcattttgctaataatagaatagtgaataataataccaacaacaaaaacaacgggaataataataataataataatgggttaattaaaataagtggttcaaataaagctaaggttaataatattaatacgattaaaagaaacataaatggaagtataaataatgataaaccaaagagaaaaataggatagtgatataatacgagataaactgaagaaatctaagaattcaatttacattcacaattttaataaataatatacagtttggtattaaataaataaatacattatacaactttattcttcttcaatattttatctaatgcattatcatttatatcatttttacgttttttataagtattaatattttgctttatattattaattttattatttttacttgaatcccaatttttatcctctaatgaattatctaataatccattatcaccacttattgaaattgtttgtttataagatttaattcttaatctaccatttaataaaacttttaaactccaatctttaaacattaaattacatctatttgaatcaatacccatcatttttaaaattggtataacattaattgaatttcttaataaatttgaattattaaatgaacaaccacttgaacaaattaatccacgatttctacttgctctaataatttgttttgaatttgaaattgattgagctctatttctattatttaaaaaatctgtatatttaatttcaaataaaatacctttatcaattgctgaacataaagttttatgtttcataaaacatggtaatctatcttgtaaattaaatgaaattaaatcaatctctaaattagaaattgcactttgaaatgatttttcagttaatggttcaactgcaacaatatcgaaaatttgttgaaattttgcaaaattttgacattgacttggatcatcaattttaattgtaattcttgtgaaagattttaattttaccactaaattcactaaaatccttttctaaattaattggattaattaaatttaaatcatttgaaattttattcttatttgaattacttgttgttgttgatggtttaaaatttaatgcaatatgtgtataacctaaaattattgatgtattaatacattttttaacttcaataagttgatcattatttatagtttcattgaaatcagaaagtggaaaaccaatatttaaatcacaaagcatttaatttatacttcacttgatgactaatcagttaaaagaacattctagcaatattattaaagattgaagtaggtaaatttagagtgaaattttttttgaaaatcatgaaatcgatttcgcttagtataaatttaaattcttggaggcttaacattttaatagatttcagtggcaaaatcttcttttctttattctttattatttattcttcaaagactatgagtgcaaaagttgagagaaagaatagtgataagagtgaaagagatagagatagagatgaaggtatgctagatattggaaaacattgtacaatatgtagagaattagatttcttaccatttgtttgtttgaaatgtcaaaaatctttttgttcaaatcataggaatgaatataatttacatccatgtatgattaaattacaacaagaaaaattagataaacaagaaagggagaaagctgatatttcaaaattacctaaatcacagagtgttttccctgatttaaataaaatccggaaagaagcagagattaagtatcaagctgaacaaaataggaaaatcggtcaaagattaacaaatattaaagatgataataataaattattaacaagtgttgaagttgcaatgttaaggttaaagaagttgttgggtaatactaaatcaaataacaactctaaatcaagttctggaatgaaattattttcatttggtaataataaaagcactaattcaacagcatcaagaatggttgaattaaataaattgaaaagaagtgcaaagggtgattacacgtataccaattaatgatagaatttatgtatggattaattataattctgatgatgatacaagatttgaattaaacaaggacaatttttctccaaaagatggccaattggtaaaatgttagatagtagtgctgaattatcaaagataaaaaatgttaataataaagaagttgataaatcattaaaactggcaatgttcagaaggaaaagagatgataatagtaaaagtaatgataataataacgaagaggaatttatttatataccaacaaatggacgtgtagagaaagagattaaggatggtgatgaaatatacattctacgtggacacagataataggttttttttatagaatttgtattattaactaaaagtactatgtaaaaaataagaaacagttttgaaaaagtgtcaaatgatggaaaatcgcatttaccaggggtacattgggatattaaaaatagcgtaattgtatgattattgattaaattctggaatctttcaagtctatgataatctagtatttttatataagcataccactactctacagagatactagaccatgtacattgtctattaataggataaaataggtgtaaaacaggaatagctccacaacatagacaatgtcatagtcatagcgctaacttattgttactacaattagtaactgttaaagccgttgataaggcttagaaatgtggtattgttaaggtctagaatggataggtatatagtaagtacatgatatacgttatgaggggcataaaacaatgcctaatacaagatcgatgtagtttaaccgttgggatacatgagtttttaatgttttcgttaaatataagtaagttataaaagtaaatggtatatagtgataaaatctatataatatgcaagaaatgaaaatttagttagttaattaatctttttaggaaagcttttttttgtattatgtatgtatgtatgtataagataattgaataaatgcaaatatgctagtaatacaggttttctattatttatttaatgaatagaaagccatttttcgtaatttttttctgatgatgaatgcaaaatgttagaaatattagtaatagttgtattagtattttttgaatcattagtagtaggacttggggttgttgtttttgttgttgttgttgtattagtagtagtagtaacagctgctgctgtagtgggattattattttttgtatgatgagcaatacttaaacttgcacttctatttctttgaataacttgaggttttttattattaattgtaggtatatgtaaatgagggttatatttaaagaatttgacagtctctccgatattgaagaagaagaatttaaatctaatctatttgaatctaaatcatttaataaaaatgaatttgatgatgaagttgctaataatggtgattcataagttaaatcttttaaatttggagatttaattgaacttacaactgaacatcttgaattaatttgaggtgtaagtaatggtgataaaattgtgggcacattatttgaactatttgaattatttataggaatttgttgatttgtacttatatttgaacttgataatgaatcaatattatttattacattactatttgaattatgtaatgagaaagaaccatgaatagaaggtaaatttatatttgaacaaactgataaagatggagaagttaaattattttcatcaaataatttacaatcatttgaacaataagctgaaccatcttgtgataatttatcacaaactatacaataatcttcaaaagctgacattattagtatatatgagagtatatatatatatgtgtgtgtttgatggatagagatactagatagtaatggatcaagtttaatatatttataataatgaaatcaaatgaaatgaaataaattaatcaagtgaaaaaatttcaataataaatatagaatagagtgaaaaatgtgatgagtttagaggtaaacaaatacttcaagataatgtacaggggaatggttaaactaagtaatattaagagtaagaaagggttttactaggtataatatgcaaaatttttccaacaagaacaagaaacatagagcaatgtacatgaaacatggccctgaaaaagtaataatagcaaattgtgaaaaaagttcatgatatgaaacattaaaagacttctccgatttgaaaataaaatttttcattttccattgcacgtggaacgttatggaaatttattatttatttttgtttgttttattatggttaaggtctatttttatatacctttaatgggttatctgctaattgttattgattattattattattgattattattgatgttcaataataatataaggtacttaacacgtatatattgtaataatactattggtattaaacctttccatttatttatacgtaataattcatcatcatcttcatctactaatatacccaatgttataattaatgatgctttgaatgaaaatgttcaattatcacttgataatattcatcaaattaaactagaaaaattacatccagctttattacaaaaggcagattcaatgaaaaatgatttaaaattattagaattcaaaattacaagaaagtagtattaattcatcatcaaatttcagtatagaggataataaaaattattcaaatttatcaaattttatagtaacttataataattttattgaattaagggaaaattataaagaattattagaaatgattaataatgttgatgaagatgatcaattaaaacatgaagcaaaattagaattattttcaattataccttcatttataaattcaattaataaattaaaatcaaatttattaccaaaacatccattttatgataaatcaacaattattgaattaagaccaggtgcaggtggtcatgaagcaaatatttttacaaatgatttacttaatatgtatataaaatactgtcaatttaatcaatggccttatgaaattttatctaaaactgatcatatttcaggttctggtataattgatgcaactttacaaattaattataatggttcatatgatcgtttaagacatgaagctggagttcatagagttcaaagaattccaacaactgaaactaagggtagagttcatacttcagcttcaggtgttgttgtattaccaaaaattgatgataataatagcaattcttcattaattagacaatttaaacctgatgaattgaaaattgatgttatgagagcaagtggtgcaggtggtcaacatgttaatacaactgaaagtgcagttagaataactcatttaccaacaggtattgttgttagtattcaagatgagagaagtcaacataaaaataaagataaagcattaacaattttaagatcaagattagctgaaaaggaattaagagagaggcaagaaaaggaaagaaatgagagaacaaatcaagtttcttcagttgatagaagtgataaaattagaacttataatttccaacaaaatagagttactgatcatagatgtaattttacattatatgatttagatggttgtatgaatggtacaaaattagatttaataattgatcaagttgaaaagaaagaagctgataatgctgcccttgaattgattaaagatattgaaagtaagtagtgtattgatatagaagatagaatagatagatagatagaaaagataagataacccatgtatatagattacgtaacgacaccgacgatcgacgcgcttattttcttggatttttaagatttcaacttaatagtgtatttgagattatacatgaatttgccctccaggtatatactagatatttcatttcttaaagaacaatgacaattccttcgatacaggacgccgataaagctttcaccgataaagattatcaaactgctgaatctatttatcttgatattttgaatattgatataaataattataataatgaaaatagatcaaaatcagagaaaataattgaattacaagagaaatcaattataaacctttctaaaatttataatatcaatgaagatgaatcaaaacttatagatttaattaataaatcaaaaataattatgagtggatcatttgcaaaaagtaaaacttccaaaattatcaaaattttattagatgttttagaaaattcattcaattggaagaataattcattaactaattcattaaataattcaattaaaattacaaatgaatgtattcaatggtcaattgatcaaaaaagaactttccttcaacaatctcttaaaattagattatcattattatattataaaaataaaaattatatggaatcattgaaaattattaatcctttaataaaagaattcaaaaaattagatgataaaacttctttagttgatgttcaattattagaatgtaaaaattattttcaattaaaaaattttataaaatcaagagcttctttaacaagtgcaagaacaagtgcaaattcaatttattgtccttcatcaattcaagctgaattagatttaatgagtggtatattaaatgctcaagataaagattttaaaactgcttattcatatttttatgaagcttttgaaaattatcaattacatgaaactaaaaatgatttaaataatgaaattgaagataataaatcaattaaagtacttaaatatatgattttatgtaaaataatgattgaaagaattgatgaaattaatcctttattaaagcaaaaatcttgtcaaaaatttattaataaatcagatattgaagcaatgaaatcagtttcaaattcttataaaaatagatcattaaaagatttagaaaattctttaaaaatttacagtaaagaattaacacttgatccaattattagatcacatttatctgatctttatgattcattatttcaaaaaaatttattaaaattaattgaaccttattcatgtatagaaattaatcatatttgttcaatgattggattaccaaaagatgtaattgaatcaaaattaagtaatatgattttagataaaataattttcggtgttttagatcaaggtaatggttgtttaattatttatgatgaaccaataaaggatgaatcttatgattatagtttggaaattattaaacaaatgtcaaatgctgttgatttactatatgaaaaagcttcaactctaagttaataattctaaattatatatacttcttatataataatataaactaaaatatctaactaacttttatacataaataccttgattattatcaccatataatgaacaactgatacttgcaaattttgttaaaaatgttgataattcattagttgaattgaaaatttcataaattttaaaactttcatcagctaaaatattaacaagttccttacttttatgtataaatttattattatgtgaaatattataattcattattaatatatcaaaatattgattaaaaatatttggaatgtaaattcttcttaattcaatgaaaacttctttatcattatcatcatcactattatcatcatcattagctaaatcaaataaccatgttttaactaatccatctaatgataataataattcatttgtcttttcatcatctttatcatcaattgaatattctgataataatttgaaagttttgaataatttatgatattgtgttaattcaattaatctctttggtgataatatatcagtattatcatcaatattatcatcatacattgaagatttaaatttataatcatcaattaattttggtaatgaaattgattctaagaattcaattgctgaaccaattttaccaactaataaaaatcttctaattaaaattataattgaatctaatgcatcaaatatcatatttgaatcaataaaccaataaattgttgaatataattttttatcaatttcatcaatttcataaattaattgaatttcattattaattggataaaattcaattgtttcattaaatgctttctcaattgtatttcttaaaatttgttctaatggtaatttaaatattctaatattattaatttgattaattctctcatttacattaaattcaaattgaaataaaattgttgaataaatttcaattatttcatcattatttggaataaatgatatataagttggaactaaatcatatgatttatataacattaaccttattatataacatttcaataatttaatataatcgttatttgaaattaattcctctccataaattaattgtaaaattattgataaatgtgttaaaattcttaataaatatgattcattacttatttcattttgtaaattttcttcattatcattttcatttaataaatctaatgattttattgtattattcatcaatgttttaacattatctgatattattgatccaattaaaactctaattgaattcttactttgttccttaatagatatattatcatcatttgctaatttatttaaaatatcatcaattgaatttgaaattaaaggtggtgattttagttttttcagtaattcattattattattattattattattattactattattatgatcatatttaaaaatatttcgattcaagtttggagttaaatagattatctaaataaaggtataatttttcttcccatgtattaaccatttgatttgttgataaaaagtcagatgataaaaatccataacatgctttttcataattttttgtttcattttgacataattgataaattgttctctttcttaataatttattcattacaccggaaggtattgtattattagaataatcattcaaatcaataattggatcaattctatcatttaaaccatttaacattaatgcaaaatcccaattattagttaatgtacataaagttttcaattcatcaatttcatttgacattaataaattaaatgctcttttgaaaaataattcatccttgaatttatcattagtatcaatcgacaatccggttcttagtggtgcgtctaaatctaaattcttgactaatgatggatctttattgatattattcaattttaaagtggtatttaaccatttaattgtctgaaaatcaacatcgtcatcatcttcaagatcattactattattatcagtatgtgatgggaaatctaatttaaaagtatctgataatgccttcattgatgtaaatatttgtatcaattgattatctgatgatataatttcatcagttataactgtttcagatgaatattcacaaatattttcattattactcttatttttttgaagttgttcatttgataataaatctttattaaatttaacatctagcagagattctaaaatagtccaaaatttacattccagtacccaattagatattagatctaccttgtgatggatcagattcatataatgttattaatttcttgtaagttattagtttaaaacctaacgcaattgaacgtagatcctcctgaccgaaatctattctgaattttctcaaaacacctgcaaatgatgaatgaatgttcccatcctccacttctaccattatcgagtcatccattatgtttctattgctctgtttctagaagaaaagttgtgtaaaatgtagctgagcattaaggatatacataaatttaaaatttcaaaaaatagcaaaaaatgagaaaccgtacaccaaaatttcgaataatcgtgttgttgaagctttaatgcagaataatcaacttaacactttatcaaggcttctcctgttttgattgcgctagaacttcacatatagaagggtagaatagacaatggtggaagtatcattggtagtcggtaaactggatgcatccttaggcattattattaacaaaggatcatcatttaattgaatttccaacaattttattgccagatggaataacaactggttcaattgttaaaatcaattgtcaaagggatattgaacaagaaaatcttgaaaggaaacaatttaatgaattacaagaagaaatatttgaaattttcggtaaacatgaacctgaaaatccaatattgaaaattgttaatgttacacaaacttcatgtgtattagaatgggaaccattaaatttaggtacatcagaattaaaggaattgacattatataaaaatggtgttaaacttggaccaatcaaaaatcctttccaaaagaaaaatattaaatttagtggattaccaattgatacaccatttaaatttcaattaaaattagagacatcatcaggtatttattattcaaatttaattgaattaagaactcataaaatgactgatttatcaggtattagagtttgtattggtgatattgattataataatgaaaaattctcatttactgatttaacagatttaattaattcaattggtgcaaatgattattcaactcaagttaaagttgatacaactcaatttatttgtacaaaagattcaggtattgaatatcaaaaggctaaaaatatgaatatcccaatcataagacctgaatggttaaaagcatgtcaattagagagaagaattgttggtgttaataaattttatttagataatgaaaatccaatttggaaatctaaaaatttttgggaatttgaaagtaatggggtaattaataacaatgagacaaataatgagaataataataataatgataatgacaaaaatataactccaataagtaatattgaaaacaatcaaagtattccaaatattgttgttgaagatgaaaaattaaataccccaactcctcaaccacttgttgaagcagaacctgttgaagaacctgttgaaggatctgttgaagaacctgttgaagcaccaattgaagcaccaatcgagtctgtaccagttgaatcagaaccggttgaagaaacaccagtagcagaatcagaagctgttgaatcattaccagtcgaggcagaaccagttgaagaagttccaattgaatcagaaccagttgaaacagagactactgaaactgtaccaattgaagaagtaccaattgaagcaccaatcgagtctacaccagtcgaatctgagccagttgaagaagtgccagtcgagtcttctccagttgaagaaataccaattgaacaaacagcaccggttgttgaacccgaaaaagtagaatctgaagtagttgaaactaatgaagtaaatggagaaccaacagaaccaattgaagaaccggtagaggaaaccaatggagaatcaaaggaagaaccaaatgaacaagtagaagaatcaaatactgaaccaattgaaacaattgacaccgctgattctccaatcagtccgtcagaaattgaaccaacaccatccgaatctataccaactacatcagacgataaggaaaatgatagtgaaatactagaagaagttgatatatcagaagaaaccaataataatagtaataataataataatattaagaaaaacaacgataataaaaagaagaagaagaagaaaggtaagaaatgatctgtgataaattagttttatataatattaatatagtattggtatataaattgtagactttatttttttttcaataaaaacctataatataatataaacaacaattaaagctaagaaaagaggatatagttcataataattattttaagaatcaccaaataaacgtctaactttccttaaaactgaatctttttcaggatcatacgggtgatcttttgaaggtatttctaaaattgcagggaaagcattactataagaatcaatttcaattctaattttatcagctaaatgttgattaattaataaaattgcaatatcatttctatttatgaaactattaaaagttttcaataattcatcacttgaagtatcatcattacaaattttaaaattagtttctttaccttcctcagttgtaacttgaccaattcctgctaataacataccagtaattgtatcatcatcccccatacaagcaaggagagttctattcttagcttctgatgccattgccctataatatttataaagaatatatactgataaagcaatatcgaatcattcactctattaacaatcaatgcagccaaattttgaggtattcgagaaagataatgattttacgtaaagttacatgaaatttcaaattatttcagctatttcttaagaccgtagttacaattatttcttttaagagtatatttattggggggataagtataaatgattaatagagttaatatcaataatattagaaatttccatacttgtagaacattattatcgggacatagtaaatgggctactattaaacataaaaaggctgcaaatgatgcagctagagcggcagcatcatttagaatgtcaaagcaaattcaagttttcgccaagatgggtggagcagatttaaatcaaaacattatgttagctaatgcaattgaaaaggcaagagcaataaatattcccaaaaaagttattgaaagtgcaattaagagaggtacaggagaattaaagagtacagaaaagatggaaactgttgtttatgaaggattagcaccgggaggagttgcagttataattgaagcaattacagataataagaatcgtacaattggatatattagaccatgttttaagaaatataatttaaatatgacaccaacattatacatgtttgataaaaagggagttttattaattgatattggtaataagacaagtgatgatatatttgaagaaatgattgaaattggatgtgaagatattaatgagattgagaataatagtaatgaagaagaattaattagtaaacaagttgatgaaggtaatttaattgaattaattacagatccaaaagatttaggtaagattggtaaaattttaaaagaacaaggatataagattaaagaaatggggattgaatatcttggtaaagaagatacaatggtagaaattaatgatgaggatacaatgattagttatgaaaaatttatgtcattattagatgatattgaagatattactcaagtttatactaacttaaaggaggagtaattggtatgatgattgttctgtatatagcgtatgtttacaatttttttaaccatatatgaattaatagagattttaatattataatagtaatagtattatatgaaatatgaaatatgagatgaattttttgatgtaatataataataatgatagagatatataaattaaatataaaagtcaattaagaagaaaataaaacttaattattaatttattctttcttttctaaagcttcttgaagtttatcatcgaaaacaggagcagatctacctaatttaagagttctatcagttgctaattttttataactgaaataagttgcagaacaacagacaacgaaacaagcagcatataaaggatataattcaggtggaacgtggaaaagtgattttggagcagcagagaatcttgggaaagttggtctcattgttaattggttgttaaaagatacaatacaaagagtcaatatctttgaattgtaaataaatttattttattcagtttaatcaatcatgtattatgttaatgtggtctcattgaagaaaataaagggtgtattacgtaatacattgaatagattaattatccaataagaacttagtataattaaaataaattatctagtactggtgtaccggtgtatgatagacgcgtctgtcacgtgatttttttatttttaatatgataaaaatacttaaataaattttcactaaggttaaccccccagtggcgacgaaaaggttaaaatttcacagaatttcactttaaacagagccttcaattgatgatatcaggattctgtttggtttaattatatttatctatatcttatctatatcttatctattatctctctaaggcttctgcatacacttacaccacttcatcactttcaatcatgcagaagcacaattatcgtaataatagtcataataataatggccataacaatagtggtaacaatacccctaatagttataataataataataataataataataccaataataccaacaataactccaattcatatcaatcacagaaaacttcacttactccttctgaatttgaagctgcaaataaacatatgaaggatagatttgtttatgctttagcaaaatctttaggttcaaaaattattgttacaacttttaataatacaattactggtattttatattcaattgctgaatttaatgattttataccttcaattataattaaatatccaacttctgattcaacagttttcaatgatgaattattatatattcaatattctcaaattcaaatgattaaatgtaatcatattaatttatcttctttttcaaatcaaaaaaaggacattgatattattaatactaataatactaataatacttcaaatgatcatttaaagaatgaaaaattagatactaaatcagtaggtaaatcagaattaaagaaagaggttaaggtagaatctaaatctgaaccaaagcctgaatctaagcctgaatctaagcctgaatctaagcctgaatctaagcctgaatctaagcctgaaccaaaatttgaatctgaatctgaatctaaatccgatccgaagttagaatctaaactttctactaaaccaaaagttgaaaaattagttaaacaagattctaaatcatccattaaatctaataaatctgaaattgaaaaaaatccaataacagaaaagaaaacagaatccaatattgaatcagcaaaaaaagatttatcctcatctaaatattcttttaaaactgacactgatatttctaaaacagatactgatatctccatagataaagcagaagctagagcacttaaatttcaaagatgggtacctgataatgaacctgttgaaacttattcaagtcaaattaaacaaaaaattaaatcatcaattagtttagaaaatgaattagcatcttctaatcaaaatgaatgtgaatatgatcaatttaaaacaatgaaggaaaaattcaatattgatgcatcatttgatgaaagtgaatatacaagtaaattggatacttcacatcctgattataaaaagagaagagcagcagctgaaaaaatttctgatgaaattcttaaagctggtaaatctggtaatgcacatttagatgaagagagaggtatagaaattagtcatgaaattatggatgaagaagataaatattcaggtgtttcaaaagaaaatgaagaatcaagtaaaaatttatttaatttattgaaaaattcttcaaaggatgatttaaaggataataatgcaacaacttatactttaactccaattaataataataccaaagatttccctaaagtcaataaatcagaaaacacctctaaagttgaaaaaattgttgaaaaaatttctaaaattgaaaataaagttgaaactattccaaaagttgaaaaacctaaatcaaaatcaaatcaaagtataactacacctaccacatctgcatctactgcatcagctacacctactccagctgtcataaaaaaaccatcgactgtaccatcatcatcatcatcattaactactaccaagaagaaaccagctactgataatgaagtaaaagaaactttaaaacctgttcaacaaaagacacaaacttcaatttctacatcttctactccagcttcaacaagtactcctttaccaactactacaactactaatataacaacaccatcctcatcatcctcatcatcatctgcatctgttaaaattgcttcaattcctccaaaaccaaaagctcctacacatcatagaaactcttttaattcttatcaagcatctccagttaataattataataataataatttacattcaccacaacaacaaatgcactcaccacaacactattataatcaaatgccaagaactccacttgtgaataataataataataatcaacataataatcaacataataaagttcataaatttaaaatatctaataaatcattagtttcaaaggataattcatcaatagatacaaaatttaatatattattaacagctaaaaaggaatatttgaattcaacaaaggatgaaattaaacttgatataataccattagtaccagcatttaaatcagaattaagttggtataaatccatcaattcatcatataaagatataattaaatcaaaacttcaatcagatgtaatgataccaccaagtcctcaaataatgtatggaaatgcaccaattaatcaacattattcacatcatccacatcataatcatcatcctaatcatcatcaacaacatcatacagtacaatatatttcaccacaacaatatattccaccacaacatccaatgcatatttcacaacaaatgggatatcaaatccaaccaatgtatgattatgctcaatatgcaataccaccaggtcaaggtcaaccaatgcaatttatgagtcctaatataccaccaaatccttatatgatgatgccaaatagtaacatgatgtataataataataataacagaaatcattacaatggtaattgatgataatgttgaatatctttttataaacttttgtaaacattgttttatacaatataattaataataataaaataataaaaatatttgaaaatcaaactgaaaatagatcttattacgtcaaaataaatttaacggtcaaggaacaaaaaaaatttttttttttcagataaatttctttatcagttctttatcaaaaaatctattttgatagataaataactaagcacataaaatggaagatccatcaatttatcgtatacttggaccaatttacatttcctcaattttaccaattgaacaagaacaggatttatttgaatcacataaaattacaacaattatttcaataactgattcagatataccaactaaatataaatcatcaccatataaaaatattcaaattaaattaaatgatacaccacaagatataattttcccctatattggagaaattaattattcaattgcagagacaatttacattaatccagatatggtaaaaccaaaattatcaggtaatgcagttttaattcattgtcagtcaggtatttcacgtagtgttacatttgtttgtgcatatttaatgaataaatttaaattaagtttagaaaatgcattacatgcaattagaagaaattatccaaatagaacatttgaaccaaatgaaggatttttagaacaattagaaatttataatgatacagaatatacaactgatttacaattattgaaaaataattcacctcgttggcgtggttatagaatgaaatatttaatcaatcaattatatgatgaagataatattaacaaagatagttttagtgaagtttcaaaacctgaaattaatgataatttatggtttggatttcaatgttgtaaatgtcgtacattattagcaaataatttagtttatgtaccacatttaccaccatttgataaagatgataaacaattatttttctataaaagaggtttgggtaatcaaattgcacaaaataaatgtactcatattttcactgaaccattaaattggatgaaggataaaattcttgaaaatgatgattcattacaaggtcgtttagattgttataaatgtaattcaaaagttggtaattataattggaaaggtggtagatgtagttgtggtaaatggatgattccttcaatttatctttataaatcaaaagttaatcaaattgattcaaatggaaaacttatcttacaaaatgatcctcgtgcaatataattatgatatagatagaatagaattgtatatttaattttaatcttcaagtatattggtatttgaactaatttcactccattgaaattgtgattctcttgtagttggatttgattgaaaatcattatcaaatgattgaattcttttaggtattggtttattcaataatgttgaatcttcattaaaactactttgtagcatttcatgattatcagtatgatcattataatgatctccttctacttgcttatcttcttcttcatcatcttcttcttcttcgtagtaactaataattgcttcattacctacatcttcataatcttcatcatctgattctaattcattcatttcattattattattctcatgaccatattcattattcaattcatcggaattatagatatattgattagaattattgattaaatcatgattactcaattctgcatctaaatctccctgtaaatcatcatcattaacaccaacttgattctgtacaacttccatctccatttccatctctgaataattactattattattattattattattattattattattattatttgattgcatttgattgatattctcccccatcagatgaatactttcattaatatttctttcatttatatcattatttaaaacaccaaattcattaatttcatcgttaatttcattatcttgttctatttcattgaaaatttcattatcttcaataatttgtttcattgttttattaattccaattgaatgttaaccaattatatccaaatttattaatttcatttaatttttgttgtttaatacttaattctaaacttaatgtttcaatataatcattttggaaaccttttattaattaaatttttaattttattagaatttgaattatttgtaaatggttttggtttaatacttgtatatgatgataatggtggatgaatctgatttctttacattattgtttaatttagaatcattagttgaattgtattgtaatctatctattatattgggtatatacattgcacatatactaaaaggaagtgtatgatagatagatgaaaatatcaaaaatacttgcataatacatgtatgtgcatacaaattttgatccgaaatacatgatttttcttaatatttcttattatgcctatatacaagcttttatctatataagaattataaatttataagaataagaattaatttaaagttttttcattagaatcattaaagaaacgatcccattgaccttgtttatgtaacattgctaaagctaaaaccaatggtaattgccaaattgaactccaaaaagttttctttgcccaaatatttgctaaatcgaatttcactcttatttgcaccaccatttttaataacattaattgaataattatgacgttgttgtaaccaaaatttaaatgaattataagtcatccaaaaatttaaaattgatgaatcaaatgcaaaatatttatcacaaacattaaaataaattaatgaaaagcaaattgggaacattaaaagtgaatatcttaatgcaactcttgcatttaattttggattaacaaaagctgtcattacataacctgcccttttatattcatctttaatattatgacttaatgaattaaaatgtgggaattgccaagcatataataataaagctaatgaccaagcaccaggatctaataatgaagaatttgatgcccaacccattaatggaggtatagcaccaacaattgcaccaagccaagtatttaaaattgattttctctttaatgatgtataaaaccaactataaagtataatattcaaagcagctaaatatgaaacaattggattaacaccaataaataaaattgtacaaccaattgaaccaattattgatgcaaatgtgaaagcttcataaggtttaactaatcctttaacaacaggtctagttgatgtacgaaccatttgtgaatcaaattttggttctctacccatattaattgcatttgctgcacctgatgttaataaagtaccaattgttaatgaaaaaaattttgtaaaatctaatggatttggagctaaaatatatgaacaaattgatgataacataattaaaaaagttaaatgaggtttagttaatgtaatatatggattaattaattgtttaaaagatttttcatcaccttttaaatattgttcaataattgattttttatttattgaatcattattttttattttaacatcgaatggtatatgagaattatttactagtagtagatgatgatgatgatgatgatgatgatgatgagtatgaattggaagtagcagttgtagggtgacaaatttgacttacagtttcagttgcagattgtaatttacttgatgaatgatttcgagtggaaattgagttatgattattatggttattatgattattatgattatgattaagaatagtatttttattattgatactgatattaagattatgatttaagttataatttgaagtgaatatattattatttgatcttaaataattatttgataagaaactaaaagatggggaagtaaaattttgtgaagttgaagttgaagttgaaacatatcgccttgaaatcaggtgtagtatatgattctgggaacccataattatacagattacagagtgatatactgtaaatatatttgtacaaaaaaaggaacctatagattactactattatcaatcaatcatgctgtgtggtgagagttgatttaatatataagattaaagttaaaattttattatgtgagcgacgcatcgtcgccgcagtggtttattacataagcattattctatacagttacagctgttgatttagcattgtctattttattatcaattagattgtggaatgcaatgatggaacggacaagactagccacatacattatcatcaattgatcatttgttttaacattgaatgcagttgaaagatttgaaggtgaattgagatcaatactggtattattattattattattattatttattgaatcagatatttgtgatatatttggtaaaagattgaaaatatcttgtaatttacctaaaattgttgaattaattggtaaattaccattaattatttttgttaaataaattacaattgaagataatttatcattaagagatttaagagatttaaaattatttgataaattaattgttaaattacctctattttcatctctaatatctcttaataaatgttcaacaccaatttcttcagcttcttgagcttcaattgttgaaggtaaatgaataaaagtttgattaattaaagtaccatcatcattaatttcatcaaaacttttataacaatcagttggtatatcaattttattatttgaatgaacatcaacaattaataaaattgggtttaaagttaaatttttgaaaacattattaattttaagatcatttttacgtaattttggaccagaatgataccaaccaattaatttttcctttgcattaatttttttaaacatttccatcattgtatcaatataattatgatctaaaaaccaaatatttggattattaatatcttcttcataaggtattgcaaaagaatttgtaattttcggattatttggatcagaattatcacctaatataacaccaactacacgagaaggtgaattagaattatttaaattatttgaaggagttgaatttgatgaacgtatgacacgttcatagtgatcaacaacagatagtagcactagtggagcaacagagacaaccattgtataaagaacaagaacagattaaataataaagatataactatttgccctcaaaaacatgtatgtaaagatcttttactttaaagagagagattccatcaattacgtaataccataaacactaaatttccgacatgaaaaaatttgacagatttttcacatgctttattactagcttattacttaatagtctattacatgtcaaattttattgatttattgatttattgatttgattatctcttcttatctttcttttatctttcttttatcatctttctttaggtcacacgatacatctcattaatatctcatcttattttattattatacctttcattttatagactctctcatatttatacctcaataattatgtcaatgatgaaaaaattatcagttaatccattacatccaattcgtcggtttgcaacaataccaaataatcctcgtttattaccaaaacctccttctccttcaactccaactagtattgcaatgctggcaattgtaactgttggtgtatttttaatatatgttaaaaaaaataataataatgataataataataataataataataatagcaatgatacaaccgcttatccaagaccaacttcttggcctttatttatatattcttggttacctttaaatgttgtatctagaatttggggttcaattaataatttcattataccaactcctttaagatctcctgcttttaaattatattcttttatgtttaatgttaatttaaatgatatgcaagatcaaaatttacaaaattatcaaaatttatcacaatttttttatagatcaattaagaaaagtgttagaccaattgatgaaaattcaattttaacttctccttctgatggtacaattttaggttttggtaaagtttcttcaaatgcaacaattgatcaagttaaaggtataacttatactttaaatcaattattaggtactcctgaaagtgataaaataattcattctcaaatacaaaattgtcaaatttgtcatcctgatattgaatcaaattctttaaaacatttaactccaataccaaatttacatcctcatgcttcagttttaacttcaaatccttcattaccaaatttaccaactttaaaaaatattaatactactagtagcaataataataataataataaagactttattgaatctgctccagctccaaatgatacaatacctgaaaatgatttattttatacagttatttatttagctccaggtgattatcatcgttttcattctccaactaattgggttacaacaactcgtcgtcattttattggtcaattatattcagttgctccttatttccagaaaactttccaaaatttatttgttttaaatgaaagagttgcattattaggttattggaaatatggatttttcagtatgacaccagttggtgcaactaatgttggttcaattaaattaaattttgataaagatttattaactaatacaaatcgtataaatggtgttaaagttaaaaaacatacttgttatgaatctcattatacaaatgcttctaaaactttaaaaggtcaccctcttttcaaaggtgatgaaatgggtggtttcatgcttggttcaactgtcgttttggtatttgaagctccaaaatcttttaaatttaaaattaatgaaaatgaaaaggttaaaatgggtcaagctttaggtgatatctaatttttaagttctattcccacatttatttatctatttactcatatatcatatcttatttattcaaatcaatccttttatatctttttttatacagtatctgtctatttataaagaaattattccgccttactcttgaaatacttccctctttaacttttcaataaattcaatacttaaataacttaatccactctccatatcatgattattattataacatgtgtgttttgaatctatgattataacgattccaaacacctctctcaatttcatcctccatttcaatctcaatttcttctccattactatttttaacccttcttttacgtcctttactaattataactccatcaacataattgaaaattaattttaaatcatctcccatcttctttttctcaatctcttgtttaaattcaaaaacactcatctcttcacatccttcttcaaataacattctcttttcattatcttcaaaattcctaaaaattgctaaattctttaatttattaataccttcatcactttccacacccccatatccctcttcttcactatcttcttcatttttcaaattcatctcaatcatttctctcatacccatatttaatgtcttataatcctttcttctttcaacataaatagttaaatctcttgaaaacctttcatttgcttctctattagatctaactaaatcaaattcaacttcataaaaaaattcattcctaacacatattttcttaatcaatctcaaatcaggtaataaacatggactaataacttttaacatttcatcattctttaaaaatatttcaacttcaatattagtaactttactcttttctttaccatcttcaacttttttaacagttaaacatctattctcaactcccattgtccaaaaattcctaattgcaccttgtaaataattatcttcttcaatctcactattaaatcttggataaattgatgtaattaatgatgcaatactaaataaatcaatattattaaatgcttgttgtcctccacctaaaaataaaaatcctaatgacatattaacaaccatataattcccatatttagtatatttatcactaagtccttgtaaaaatcttaaccttctcattatatctaaatcaccactgcctgccattataattgataatcctaatataattaaatctctaatacttctaattgttgataatgtaactttattatcataattaactggtttcatcatactcaatcctaataatttatcaaaatattcaagtaatatctttttagcttcaatattaccacttgatgcaaaacaaattgaaatggataaaattaaaccacataaaatatttaagtattgtaagttgtcaatgtttaattcattcatatcttcaatactacttctcattctaacacattcaggtatttgactttcaataaattctttagtaggtacaatttcatcccacataatcatatttttacataataccctaagcattaataaatcaggtctaacataatctaataattggttactttgtggaatttcaatctttttagcaatttcatggttattactcttcaaaaacataaacattaaactaattatagcacctgaacatgatttatcaaattcttttctaataaatgtaccatatgaaattaattcatcaattatatgactatcattactgctcatcatattatcacctttacctaaattaatatatcctagtgcaataccagcagctaattgataaccttcactaacaacttttttatcattaataactaatgaacaacaaatttgtgttaataaaatctcactcattcttctatgttgactctcaagataaattaatccaattcctattatacctgcagtttgaactggtaattgaacatttagatcagttgatcctggtggtaaaaaagcaacaacatgaacagataaaacttttgtcattttaatatccatactacctcttaaacttgcagacataccaatcaacaatccaatacttgtgaaaatatgtttaggtcctaaataattataaatatgccattcttcaagttgcttcaaatggccatttaatcctaatccaagtaaaaatcctgcatgttctgaatttaatttagtaggtttgttaaataccacccaactaccactaatttctttaaaatctttagatactaataatcctgcgctgacaccattataaaaataaccacactccattaaatatgaaggtattgcattatcttctaacgtaacattaagattatctggtaaaattaaactggtaaaattcattttaggtattggaaatccttcagtgactaatggttttttactggaattgaaaacagcacctctaccaataggagctgttagtgttcgtaatgcaattttaacaccaatagatctttggtgtaataatctttcatgatcatctcttgtggcgctagattcgtaggtaataatttgtggtttagaggtttgtaaaagtttgatcaattcataaaatctacgatccttcgcaaatatcagtttagtaacattgaatttgtcaaactctaggttatcatcccaagaagtgtttgaatgattatcgttatattcatcattaaaaagttcaaaaataatctcctttgtacttttcaaagttgatcgagcttttttattatcagcaattgtcaatgaacgtggactatcataatcaagttgtagaatatcctttcttccaattaatttacactcctcgttagtaatattccaattcaatttaactttccgttgacataattcaatagtattcttaaacacaaaatatataccagaagggtacgtctcgaattctgctgtatcgatattaaaagaagccatagttctaaccaaatccatatcttcaaattcatttgatacaatcacttcaaataatctcaaaatattgtacgttcttgtagtgatgattttatccactgattcatcctctcctgaaataattgaaaacgtaatgtatgaaactaaattttcagaaaataaactgcttatggactctataatgttaggaggcttgtttatatattcaggtaatgctagttgtaaattcttatcgaccaagttttcattaatatcataatattgtttccagccaggagaccatgacatccaataaacaagttgtgaaagtaatctcgatagttgatcataatgactttttgacagaatatttaatttcaagtcttctctaataacgtgtaatgctagtactattttaggtaataatggctcaagtgaaaaatctcggtgatcgttaagtagtatagttttattgttaattctagcaatctcaacatattttatcaatccagtgatttcgttcaaattagtgttaactgaagaaagattaattttctctggtaagcacatcgataataatgtcacaacataaagtttccaatcggtgcaatggggtatatttatttgtttgttagagcaccatctaagccaaaacatttcatgtatcaaattatgactcaaatattccaaagatttgatatatttttcaacatacttatctttgatattcattgataagtgagtaaggtaatgttcgccattttctgaaagaaatgagacttcatagttttgacatccatcaatttctatcatttgttcattttcaggtggatgtacaatcatcggaggtgaaaataaatcgtaaaatggattatagagtaaaatttgattgttttttttcaaaattaagatgtatccacatttccttccctccatatcaaatttatgtgcatcaagtccttcaaatgtgagatgattcttcaatttacttgacgtacttttattttgcaacttttcaaaattataaacatcaatcatatgtctttgtttattcacaacaacgagagtttctttgtcatgaaatgatacgttaaaaacttttaaatgaatgatatcagatttgactggtattgaatgaagtttggtaaaaataacatcttttctcaaaacccaactttcagtagttgatgcaggataataacctgttgtagtatcgggaaggtattcaggtgccagaagccattctatcaaatgataatggatttgaggtagatctcaattgctttgaatcttcatcatgtattctcgaaatggatatattcatcattgcacttgaagatgatattgtacgtttactgtttttcctgctttgaacatggttgttcaataaagctttagatttggatgatttggatcttgacaaatatctgatactgtacacattgatatttttatcagaatgattaaatgtagtagctaaacaagatgatgttgtttctggataagttaagagttgttcagtttgagagaatgaagttgtagatgaagatgctataatcccaagctctccgactgaatctgtaagagtcaaaaagttgctatctacaaatgatcccgctgaagaattagtaatacctgctgagaaaattgtgtttccagaaccaattgatgcagatgtgtgttttacgtatggtgatgtaatatttagtccatttgatgttttaattccactagtgaaaaattgatcgggtactgatagtatatcaagtttcttaccaataattaagcctttatggaatggaaatgcatttttaatgtgtattggaaaactaacaaccaatacagatgttagcttatcataaactctaatctgatcttccaatatgactaccaacactttagtttgtttggagctgttattgagttttgaatcttcaaatgccgtaaaaaagctatccacaacttgtgtctctaagtttattcgacgaaaggcgacgtcaccggtaagccatatcactgaatacttaaaaataagtaacttttgattgccttcatacatctttatttgaaattttttgtttgccaaatcatcgtgtattatatctgtaacttctaaggcttttaatttaacgacacattttgaaaaatttatgttattattactatccgtttctatatccataactgtagaaaaggccaaattatatctaaaactcaaagcagagtacgaaaggtaaacattgaaacaaagtttcagatcttcagagcctccaaaatacgtctcaatcgttaaaaatgccccttcaaacggcgcgtcttttcatgtacagaaattgaaaattacatggcaaccctttatatgattgttgatttttctgtctttaatctacaccaaaccttgctctgctcttttttcaaacttaacaatcagttgaatatttaaagggcaaagtaaaacatgtcattttttagtacaatcaagtatgtattaatgttttaaacactaagaattgattattcatcgaattaatactaacttttcatttattacagaggtttcacacgaagttcaaagaagaaacaaggaaataatcaaaaatatgctgaatctaacttccctaacgattcggatccatctttggtaaatcagaatagcttatattccaatagcaatatttcaggtgcatcgttgcgtaaaacgcagtctccatctaaacaatctgtaagatcatacaaattttcccaacaaccacaacagcagcaacaacaacagtatcaaaatcaacaacagcaacaatatcaatcacatcaattacaccaacaagcatcaattcaaagctttggacaatttcaggaacagcagacagttcaacagcatcccgtcaagaatgtagcaacacaaaacccccctttattcatgtgtgaaccatttataaaaacagctttagttaagggttcttataaaactattgtacagcttcctatgtacgttgatcgtaatgaatggcttgcattgaatatatttgaattctataaccatttaaacaaattttatggtgtgatagctgaatatgtcgtacctgaaaaatatccaacaatgaatgctgatcctggtactgaatatgtttggataatgccaaataataggtcatcttcattgcctgcaaatcaatatattgaatatgcgttaacctggataagtaataaagttaatgatcaagcagtcttccctaccaaatcaggaatgacatttcctccatcttttttgagagacataaaaggaatatcaagacaaatgtttagaatcattgctcatatctactggaatcattttgagaagttggtacatttatctctagaggctcattggatatcgtattttagtcacttcatttctttcgtgagagaattcgatttaattgaatataaagagttagaacctttaagtatgttaatcgataaccttgaagctcaaggcagaattgttaaggttcaaagaaattagtactgatcttaaaagacaaaaattacattctataatattttttacgtttttaaatgttttttgattttaaaatagagtttataaaactatatacatgaactactcctaactttaaaaccaaaatcaaattgtaatatatagccaccaaatgtaaaaaaaagtcattgtaatgaagggaaaaactaaaataaactgtagataaaataaactgtatgattactttatgaagaactgaaattaatgaggggtcgtcaagtgtgataatagttggatgaatatgcgattgttgtgtttaactggaaaatcatgagaaaaagtaaggactatcttgaacaacagagacatcaaactcaccctttgggggaatgtctggtaatgtaaatggaactaataatttgaattgaccagtattatctacaatggtatcatgaacataacctatttcatttaatacagaaatagaagatctgagggacttaccaagttcaacttgttttggatctttggaattaagtagtaatcttctttctctttcaatcttaacttcatcaaggaatgttggtgctctaccaagtttcttagctaattcagctctatattgagaaactgcttctgcaacaggtgtattcttatcaacggaaattaccatcaagaagccttcataacgtctttcgaattcaccttttaatttttcaatcaagttatttttatgtaatctgataaattcttctcttaaaacatggttcataacatcgacatcacaagcatgagtccaataagaatcgtggacagatgaaaacagaagaccatattcagaacatttattaactgacattaacatatgtgtagcatctaaggagtgaatgaaattaggtgggaaaccattagcttgttttctaccatcaactttttgaacaccatatggatcttgaataataaaagtttgcatattggttttaactaccttattctttgtacttctgtaaggttggacgacaggtaatcccaaaggagaagtccaaataactgaagaaataaattcatcgccttcttcaggttcaacatctaaccttatactctttgaaattctccttgcggcaagtgctaaccaatcttgaattgcatgagcaccatcaaataattctctaatagctctaaaaaccttacctgttaaatattttgaacaatttgaaactgcatcttcatcaaattcgatttcctttaatctctttgtaatttgtgctcttgcaccaacataagtaacaccataaacagatgtcataacagtttgctttacaatctttcttgcaataataggtaaggttaattcagcttcaagcacaccatcttccttatcctttgtaacagccttgataacagaattagcaacgtgggtataaacatcagatggtctgtcagctggaattaaattaacttgtctagcaccttcaaaatcaccacctaatgcagcataatgttgtaaaccattacatgtaccatcttgatgaacaggttgataagaaacaaatttagttggatctggtaattctaatgcttcgattaattcatttgctgcagctaaaaattgccatggcttatcagcactcttccaccatcctttacctcctaatggatctttgacagaatctctgattaattcaatattatcttcaatatattgagctctttcgtctaaagaaatcttatctttacctcttaaattggaaagatgaattttcagccattttaaaccgtgtgcgcctaattctttaccagtccaaaatttaagtaaacttctagacatatcgttacctaaatgattgaaatttggtggaattgggtatgctctacctctaaaatctaatgaatgtgggaaaaagattctttcaccaacaaaagctcttgcaatttctaatttataattcatatcacatctcattgatctatttttggagtattcgttaacaatttcagtacaagctcttctatatttaaaaacttcaactgcttcacaacctttttctggtggatttggtaaaacaaatttttcatcagcttttgggatttctaaaaattcttgttcagtattccaaactttagtaatcaattctaacatttttttattaactgtccatggagtattgcccagattatttaaaccttgtaaaactctatcaactttatgatttattgcagcagcctttgcataagcactttgctctggagaatttttagctcttaacattgtgacttttttcaaaaaataaccaccatcattatgtgttgtccatggttttggtctacaaatcattggtaaatattgtgcttgaattgattgatctaaacgttcttttcctaatttatttgcaaaaccttgattaagtttaataacaccgatacgtccaccattttgaaaatcatatgtgtgatagaaagctggggctaaagctaccttggtttcaccagttcttggatctacaccggtaacttcaacctttgcaacttgtaataagaaagaaagtaataatgaaccaatacgacataaagattcagcatcccatgacaaactacttgattctgaatttatttgattttcatctaatgttgctttttcaactgtttcaacaatttgagcagcctttgaacttcttaagaacttcttaaattcaggtgtatttttaattgctttaaaatttttatgaacatcaacatcagcagctaaaatcttttcagatttatattctagttctatacctttacctatacccataaccagtttagaaactggaacacctctactaatatcagaggtaacaatactcttcattgcatctaaaatagcaatagttgccagttttggagctttcaagatgttcaaaaatgggccatatgttaatttttcattgtatctagctaaatcttcctttgataaatccttctttcctaacttttgactgacaagtaattctcttgcagttttacattctttgacttctttttcaatcagtggaatcagttgttgtaaccaatcgtgtaagtatgcaccaacaggtgaaggtaatgatttatctttaatattttcaaattctctttcccatttcaactttgcagcatctaatgttgaactttctaaaagacgttcacgaggttcagatatgttatctaaaatatcatcaaatttggcttgttgatctaatggtaatttattctttaactcaaataaatttaatgcattttctgatgacattttgagaatctcttcagtgtttatatcaagtttttcaagttcaaccaattgtatcaacttattggtaaattctccgttagaatcgatcaaacccaaaagagaatgtctaatatttttcaagtttttggaatcaactgcttttaatttttccattttattatccacaacttcgtttgaaggttctcttctttcagccttttcaggtgagctgaaatctgctggaatctctgtaattatttctctttcgccttcgttgttattgatatctctattttcatttgttgtatcgttttcctctataaaatgttctgtatcctgtgatgattcgatattggatgataatgattctttagcagatactttaacagaatcatttgattcttcctttaatgctaaaaataagtctttgtagtttccggtaagttcttcagcatattttggtttgaaatcaactaatttcttgatgttcaaaagaccaataatatcaacatatcttaatacatcagcggttttatttgaaggttgtaaaacattatattcattgaaaatttcacttgcagctttaacatcatttgttttcttgaatgataatttaactaaccatgcatatactcttgcatcaggtaaaaaatttctatttaaggaacagacatatttcaaccaacgacgaacttcatccatggaattggtttcttcactaccccatgttttgaggaattcacagatagcatcaacaaaatatggaccggaactatgtttagaagaagcgatgttttgtaacattaagtctgctctttcataatccccactctctagacaagcttcatataatgaccaagtttgtaaaatttcgggatcgactctagttaaaactttatcatatggagttgatgtaaaaaacatttcattatctttaggtgaataatacttttcatttgtaattctggtgtaaacatcatctaaggttttgactttcggtatactgcttttggtttcaacagcaagaaatctaagtcctatatttctattctttgtaatcacacgagattgacgcttcaagcatgattgaatgttacgtgagttaagtagtacattcatagtgtattgtgaatgaaccctttgaataactgacagataacttgcagagttcaaagataaaaatgtggaaactgattaattactctataatatttcaatcagttgaaaaattttgaataaaaaaaaattttgatcactagagcaatttcctagaatgaatttcatctcccatacaaatttcactcactaaagtttagatataattttaccgtttatttggttcaaaatttctttttccttctctcgaattctcttcggagtttactattggagacttttcttataaggaaagtatatcaaataatgatgaactgaagttatcgaattactatagcaattatatatgaaaaagaagtggaaaaagttgtaaaagttgaaaaggttttctacaaatggtcatcgtctatggtaagcaaattcataggttcatgagaacgttctggatctctataattttcagtttgataaagtaccattcttgaaagcatccctgcaaataagaaacaactatcttccttttcatcttgtgtttcctctgtcaaaaatgacatcaatggccaacaatggcccttgttggcctttttaacaattttaactctattagtttcaaatgcagttttacacatctcattgatctcattactttgtaattcttcatctccaaatgttattaccattcctccattgggtacaatcctattccacatttccacaaggttccaattagatggactaaattgttcttttgaaatatctgtacaataaaatgatccgtaattgttaatagttgattgtcccaaataatcattacaatgaacatcctccaaattttctgaaaaattgactatcggtgatattaaaagaacagcaaaagggtttaagtcaatatctttagaaactatcatattgtttagatcattgaatgcatcattaacaaatacattattctttattgataaatagttcaatattaaagtagctcccaatgaatcacccattaacacaattttactattaggattttcactgacaatttttattaaagactcaatgaacactttcaaacaatattccattggtgattctttacatatttcaggaaatttatttataaaaattgcagggctatcaaatccttgtaataataataaactatgtaatgttgttaaatattcaacataaaaatatggctctgaaccaaataatggaatattaggtacataaaatattattaaatcatggattttaggtctgcatgatactgtgattaaaacaccttcgggatcatttacatcttcaacttgacttaactcaattatattatgagattgaataaaagctcttgatttgaaaaaatatttccaagtcaaatttgacactaatgaataagctggatttgatttttcaaaattagttaagtctcgtaaatagtgttttataacccttgtaaggacatgttgataaaaaggactattttgatccattgaatttttagcattcaagggttggacaaaacacatgaaaaatgtatcaattgaaagtcttataactatattattagtacatgatgttagtatttcttatcaaaattgttaggatagccggtacttacattgataagaagcatttattatatagaatactgcttcatctataggataatttgaaaataagtataatacagataggaatgaaagatataggaaatctgcaagtctatactctctcattttgtctctgtagatgggtacaaaaggaaaatatgtaaaagtaagaggaaatccataagtatgattgatacactttacaaggctcagctaagatttgagatgttgcctccttttttttccaattctttactttttttttcttttcattattttattaaaagtttataaaagctaattatataatcatcgatattatattcttataaagttggtaaaactttttccattgcagaaatgaagatatcaacatgtttcttttcaaagataagacctggtcttaatctaacaccaacttctgcacaaccaccaacatttataccagctaatttcatcttttcaatgaattcagctctctttgaaccagatggcatatcaaaagcaaggaaacatgctttacccttacctcttaaattagtaataaattgtgggtattgtgattgtaatttttctaattgtgagtaaaagtaaagaccagtttctcttaatggttctaaaagattgttatctttaatttcatcacaaattgcagctgccataataataccctttggatcaccacaccaagtgttgaattgtctatatggtatatttggaataaattctgggtcatggaaccagtaaccagcagattgcattttctttgagaaagtaacaagatcaggtggaggagtaatattatatctttcatggtcccacatgataccagtaccaccacaaccagcttgaacttcatcaataattaatttagcaccatatttaagggtaatatctcttaaaccttggaagaaagttgcagaagcatggttatcaccaccttcagattgaactggttcaacaataacaccagcaattggacatttccagttttggaatctttcttcaacaattgctaaacatctcttatcttcttcagcattaaactcttcattagattctaaaggatatttatatgaagggaaatcagcagttggccattggaatgatggcatatccattttatgaactggtttagatctagtaactgaacctgaagcaaataatctaccatggaaagctctcttgaatgaaagaattgcaatttctgggttacctggagcttgatttgacatacaagtttcttcttcttctgtagtgaaaggcttatcaaaacctctcttttttgattgatagttaaagaaaactgccttaaatgctaattcatttgcatcagcacctgataaaccattccaaactaaagtttgaccctttggagcatgttttaataaatctttttgtaattgttcaaaatcagcacctgggaaattacctaaagctggtctatcaacaatagctctaatcattttatcagaacttgcagctttaattaaattagggttattataacctaaagcaattgaagcaacttgacaataagcatctaaaagaacattaccatcaacatcgataatatagttaccttgagatttttcataatcagcaacgaaatatgtacatctgttatcaaagacttcaccaagggatttgattgcatctttaccttttggacctggaatagtttcagtaacaactgaaggaccagctggttcatttgggaagcatttggatgtgtaagacatcttgttttggttagagaaagaagaaggaattacagatgatcatgatgcttttaatatttgggatgtatggttcaatttatagacaaatatttcaataatacagttttgaaatcagaaatgtatactgttgatgttgaataagaatagaggcccgctaacatagcgggaactccggtataaacggcgcttagcgaatagaatttcttagcggctggaacttcctatttatattaatttattagggcgatttcacatccgatgattgcctaaaatggacattgacgctgtcaacgggataattattaatggatattaatttatccagaagagaatgattcaccatgtcacaaaattggtgactgataacgttgaaaaatttatcgtttctctaatatttaccatagttgtcagcataaagtgacagtgatgattcacttctaagtctataattacaatttataaaaattccaatggcattgattgtgacatgaaaattatcagttttccagccgcgggttttgacaggatggcccatcttttaagtgtgtgtcacttttctatagagaaaggatccggcattatatcacctttttcgattgtttttttggttgtttgtgtatgtacaaggagtgtcatgaggtaataaggagaagaaaagaataaaccgtaaaaaactagattgaaacaaaaaatgattaaaaaattaagctattcgtcaaaagtaaaaaaaaagagttataatcgatattgatatgatgtatttatatcctgtagtaatattgcctaaggacagacttcatattctttccagagatgattattagttttcctgtaaatatgtcttctatcataaccacttcctcccagaacaacttcatcaacaagttcaacaaacatacatactacaacaaaattttcatatccagtagatgaattattaccatcaacacctctattgattgcatctaacaatttcctgctttcttcagttaatggagtaccaggtattggctttttaaaagattttttcatatttctagtaagtgcattccaaactctaagtctctcattttgccattcttcagatgttggaacattagataattcttctgtattattattaatttccattttttgacctaaatctgataatgagattgatgaatcttcgaatgttttaataaaatttggagagaataatttataattaagtggttcatgtatcgtttgtggttttaatttcttattattttgtgataaatattgactaattaatgattcattttcatcatctattgatgatgtatcacttttatttccttcattagtatcactcccaatatcgttatttataccattaatataatcattttcataagtaatatttggtgttaactcatcacttatcattcttacggtacctttaaatctatattgtttctttaatttacggaaatagaaacaagcatcaaatcttggattttttaataaatctttatatttagttgatctcttatctgtagtaaagactaacacattagttttctcttgatcaaatagaaaacctcttaaaatacatgatctagttgaaggataattatttgaatccacattggaaaaattaaataaaacgaatggtaaatcaccagcttctaattcagtttgcattgcagatgtgaatgatggattccataatgcaagtgattgtaacatgttgaatacgtttacttattataatagtatatgttgaatttattattatattctctcaactaagtggtgtatactatatatcgatatcaaatagtttaactatcttcacgaaaataatattattatgtataataattataggtactgttccttcaaaggcaaatacacaaatgtacttgatttattcactgactgatgaatatatgaacaaaggaacaaagaaacaaatactgctgttgttgcttgcaatttctgcacttaatatattatctgttggaaaacttaattccattaaaaattgtgtgcacccagtgtgagtggccttaaagtgaggcaaggcaaaaaaagacggagcgaattactggaatttgttatatccgataataattcggcatattgttcaccttttgtttgaccattggtctgtattatcagtagattgataggattgaggaaatattacagggtaaacaacagtgtaattattgaccagcttctgggaatggaaataggatataaaagataagatatacgttaatagcttcaaaaaactactgtttcactacattagcccccagatatttcttaaaagacgactcatattagatgtcagtagtgtattagcttcaaaaactgcatcagagaagagttagttaccttgataaagcatcagacaagataatgtctgaagaaaagccagtgaatagatataagaggtaaattatgatatcactgggaaaatcactgaggagaaaattaagagcgccctgaagtgcatgagactgtctctgtatttctgtatttagcattgtaaagtttgatttaattgttgtagagatatattctattgaaaatagtgtactatatcaagcaattgttaacaattgtatacataaaagttaattctcaaagctaaattgccaataaagtggtttattgtggaattttattttaaaatctactgaaaaatgttacacatacaggatttgagtccaatatttaaatcatcattaaatacacaatccaataacacaaatactaatttaaatttaaatcctaatattaatggaagtcaaaatttatctcataagtttgcaggctcaaacacttttaataatcctctcttaacaccctcttcatatactaataccaattacataaataatcattcaaatggaaataaccaatcaattgatgataaacctatgttaacttatacaaatttttataaattttgttgtttgaaaaatgttaactgttatttttatcaatttaatacaactgcaacttcaagctctaatgcctcaacttcaatctatgaagttctaagatatgaaaaattaataaaaaataaattaaagaatgattatcatatcaatgatataattacttggatagctaaaaaggaactttgcctatttcaattacaagtagataatccaaatgaagcttttgatccaaatattggttttaatcaattaaaagatgcaatgagtaatattatcagtgaaaataaattatctctaaaattattatcagccactacatttgatgcaaataaaatatatgatacaaattccaataatttacatgtgtcacaaactcaacagcaaaaaaaatcaatgaatgttgtatatttaagttttcttaaggctgttcataaatttatattacataaaatgacaaaatctcatcttttatttgaagcatcaaatcaatctctatctattgaaatatttccatacagtggacaactgcttgcttcttcaatgatacagaaaacttcaattaaagttccactaaaaaattctgaaaacaattcaaagaagaagaaaatattgaaaaaacttgttccttattcaattatgaaactaaatccatcgttaaatcaaaaaaatgaattaattgtgaatattactagtttgaaaaaaatgttttatagattaacagattatattacagtatcttgtaatagtgattttgaagaacttgataaaaaatcaaaatttgctctatacattgcaccttctggtataaggtgcgtcattgctggtgctaattatcaagaatcaataactgatgaactgccagaaaatagtgaaaacttactgaacgtgttgaaaacatttaatgatattgatttgatttccaacccatccttgatcaatgacaaaagatactgggtgaaaatacatccttgtggtttcaattcaagtaatagtacacctataattgctgattatttgaatgatgcaatctctactggtaagaaatatgtatattggcctcttgatttatgttttatccaacttccatctgattcgacaattgatttgaatatctctgaaccttcacagcaaaataatatttccattgatgatccattccaaattgttgatgattttcttgatatagtagatgaagtagaaatgaaaacacgcttctagaagtagtagtatgcataatagtatatctccggcaaaaatggcactcggtgatacaaatataattgataaccccaaagcggaatttagatttcctgataactttaattttaatacaggaaattgattccattgatcaacagttgaaacctctggctgattcagaaatggatggacttacggaaattatgaaatctaacaacgaatttgataatttattcaatgagaagaatatgaatataaacttagacctggaaaattttgacaagaattctgatgatgctttttttcagaaacagctaagcaatgtatttgattataactctgttataccaaagtccgaatatgataatgattttgtcaatgggaatactgaaactaaatctggtttagatgctatcaatcaagttgatgatgaacataaaactaataagcaagaaaataatagtgttgctgaatccattaaacaaataaacgatattgacgcagatgaaaaaaattgtagattccaattttgatgaagattgggatgatctttttggcgaatcatttggtgaagatggatctgttgaaaaaaagaatgaaaataatgatactgctagtcaagaaacaaaccagaatgataatattgaacaagcaattgattctgcaatgaatgatttagagaatgaaataaatttggagaacaacccattatctggcggtaccgaggcaaccactaacgaagataataccaaagaagaaaaacagcagattttcaatcctgaaaaagaaagcacttcaaacagcccagttgcaagcacatctccattctatcaagatcctggtgctccttcgcctattccctttcaaatatttgctccagaagattcaccaaaggaatcgaatcctccaagtagcggttcacaaaccaaacctaatcctcttttgactccaaaagaatctaaaaaatcaatcttttcaccactaaatttcaatccattaattgaaaaagatattgatagtaagtacagtaatggtggtaaattttttgtcagaagtttttcaactggtgtcgatgataatgattcaaaaacaaaaccgtcattaaacttaacaggtgattccaaaggtataaatcatagtgatagtctcaatacaccatcatttatttatcctggtagaaacaatgaaatgggactagaaaacttaagtaatgtcttgtctgatagtgatgaagaagatgaaattgattttcaagccgaccaaaaggatgataaaaataaaatggttggtggcgaaactgatcataaagggatgccctttaaaaatacgataaataatactaatgatttggagaaccatagtataagtgaaagtggaaaatctgataacatcgttagcaatgatgctaattcttttacctcaagaaatatttttgattttagccctttgggtattgggaaagatattgtttcaaacaacagaaaaaatctgtttctggatttgcctgaaaatgataaaatcaatggaattttgtatgatttagatgacacagcaaagaatgctgatattggtgccttgtttgataatgatttgaatcaaaagtacggaaaccgtggtgatggaaccaactataatgatgatgatgatgatgatgatgatgaagacgacgacgacgacgataataatgatgattatgatgctgattatgccgaagatagctctgataaaaataaggccacaactgaagaaaattctcatgaattttataaagattctattgatcttaacaatcgtggtagaaaacagaaaaaaggaagagattctattgcagatattagtacacaattgctaggaaaagaaggaaacttggccaaaagaaggaaacttgaaacaatttttgctaacattggccaagatgctgaggatgatgagttagatttagactcaggtgaagatgaggtaactgaaggttattccaatataggatataaaagaaacgatttggaaggtgaagaacataattttgaacgtggaaatgataattataatgatgatattgtcggtctctctagctacgatattgtgagtacatatcataaggatgatataggagccaatcttgttacttctagggataatgatgaagaacttccagaaatgacaaatattgatattcctaattcctggttttatgttttacgtttgatttcccctattcaaatcccgtttaattatttaggctcaacaaatttaaccattgataaaacaaaattggactccttattaccaattcttcaagagtttgttctttactctcaaaaacaaatgaaaaattctttgttaaatatgcttattcaaaatagagaatgcccgactgttttggaagatgatttagagtacctcttatacaaaatattccctaaaataaataaggtgcattttcatgagctgattgattctcatacagaatcgaactgtgaaaaaccatttgaatgtttgtttgacattccaccaacagatactcataaacatattgacaatagccaggttaaaagtgagacagttcccaaattctttcatgataataactatgaattttctcctcttattaatgtgcctcctagtgattcccaaattttagatgatactgcaaatgatgtgatgctattggattcattcaatcaggaattccaaaaattgagtattacgaattcaataagtgatgattatatgtttagaatcaaaaccacaaacttaaacatgaaaagatttgatgaaaatattgcagtaaacaaatttgctttggagttctggaaaattttaaatcttgaaccatattctgaaaagaagattttcaaagttttattagtgattccaggtgctagttcacatttcaatgagtctgctcaacactttttgttaacgttagttcagttttataaaaattttaatttaggagaaattgagtttttaaatgatactggtattttgaatatatttactgaaactaagggacctgatgaatactggaatgcaactcttaaacaacttttatcaactgttgaggttgctcatagcgtgcactcttttgacaaaccagaaagtattttattgatgatttgtgatccatttcaagatttgcaatcgattttaaagatggcagaagtatcggaagcatttaggaaagcaattatatcaaaatcattaagtgaaacagtcgataataaaaagaagaagaggaagaagaataaaactattgctagtttacctattaaagtattctacaagtcttttgctatcgaaacattgtactcgaggaataaccaaattattgtttttacaaatgaagattatacaaaactagcatttgagctatacaataattgtccaagtaatcaaaatttaaaagatagatccaatgtttttttgattgaaaaagaagttcaaaatactgttgacttcaaactgcataaaaatccacgttcaaaatcattaactgatgatcaaatgtttttacacctctgttatgaaaggtctgttgataagaaatggtgtgttgctagttgggtcgatcaatcaggttcacttaattttacaaaatcatggtacattgatgagcaaataccgggctgtgaaggatttgagaaggttgctgatgatattatgaaaattaccatggattatgttaaaggtctatcaattgaaacatttgttgtgttaacaagattgaataatataattccagatgatgaattggcagaatggaaaaaattatctatgaaaaatactgacgttttattagtagttatgactgcagaactagaatcatctactttgatattatcaaataattctggtccaaacttttcaaagaaacagagagatgatactccgagagatgctccttatactgttgtatcaagtaattcacaatctcaaacaccagcaaatatgggaaacatttctgtatacaacggagttggtagttctaaatatgaaagtcccgatgtttccatatacactcctatgtatgatgtaggactttctccactggatggtaacaatcatcaaactcaagttcctatacaaacattgcaacctctttttgaagatatcaagtcacctgatgttactgcaaagacttctatacttattgatatttctgatgaatgttatggaataatattacaagttccccaaccactttccaatcaaccaagggttcctttgaaaactgcatttttggtcaatactggagagggtgttacaaataataaaattttagaaataaatttgttgagttgtcaatccggaactagtacgacagaatttgtgaaaaaattgttgattcaatataagggtttgagttcattggctgaatattgtggaatgtctacaataataagaaattgtgggaatgttgaatacgatgatagttttgaaaatgaggaagatgacgaagatgatgaaactttggatgaaaagctattagtttctggttatactcatgaaaaagtagataaaagaaaagaaaaacaatatattcaacagcaatatacacatttttacaaaatgcagcaaagacaaaagaggaaagcgttgaaagaaagtgaaaagacgcttgaagatgatgatttaggtcataatgttattccaattcatatgcttgcagttaggaaaatgctagactttttaactaacttaaaagttgagtaataaatttctataaaaactttgtaattagtcgtaaaaagctactaagtaactaatggtttaattgtagtacgtagattatattgcgtaccatccctctggtattttatttcactcaaaagattcagctcttcattattcaaattgctcactttcaaaaattcatgaagctggaatcttaccaaaacaaacagtttttcaaaagttatgttggttttatcattattggatgaatatttttcaaaaatttctttaacctgttgaaggtattgaggaatatcttcaaaaaaacttgatgaatcaactgtaaatgatctagataaatagtgtaaaatctcaaatgaaagtacaaacagtatgttatcttcaaacgaactatatttatttgtagttgctgtagagtaaaacaggtagaattcctgactgtcaagtttaagtactaaagagcaaacttttttaataaatggggatgtgacagaagtagcaattgataatcttctgacatagttccaaatcaaactcaataaacgaactctagttgctattgaatctaaacaaattcctgatccttcatactgtttttcaatcagaaagggattctcagaaaaaatgtacttttggcccagtgatagatcggttgaaattattccgggtatttctactgcagattctaaatttatgaatgtgtattctgctaatgtaaccaatgcatctgtgtatgaactattaccaacattaaatggatcagtgaatgatgatatacttataagatttaaatggaaaagtgaactgagtacttcttcgttgttattacttagatataattgtaaattcatgaatcttattattgtgtttaaaaactcacgccaacgattccaagtctctaaataagattcataagaatcgattctttcaatgtttgtaagtttactggcagttttaaatgcaaagataaaataattccataatcttttctccgtttcagataaatatgacagtccaaaaaaactgttggctgaagttgttgaagtattgaacttatctgaagttgtggaaatttcaaatactgattgtagtttctcctttctcaaattgtcatcaatcataccacttttttcatccatactgtaatctaacatagaatcatcaatgttcaaaatagttgacatatttggatcacctcttttccttcttccacgttttggaagattaggttttaaaaatgaaaacaaagtattcaactttttatataaattttcaagctcttcttcaaaaatacttatatcttcatctgctaaatctatattttgagtttcaaacacgctaattaatgaatttaaataattaattgaaggaattgataaatttattaattcatctgatgatttatcctcaacatgattcagttgtgtggctgtcaatatcatcattagaatttcatctgttggatagtcaataaaggggagatgagctagtaatgttgattgtagatagtgaagtagttctaaaaatgtataatatctgtaaattttgccatgaacagtatcgagcttctcatgataattgatgcatttatttttaagaaataatgggttattttggacaatagattcacaatcagatgagtatgagtctctagctataggtgatgaagtaaaattttcaaattccgtcatttagttgagacctacgtgtattaggggtgacttgtcttcgttttgataactacatgaaattgatgtgaaagttgtgagctcaaaattacgtgttgcacaaaaaaaaaattagtatgagaaaaatttagattatactgtttgaatatagtttgaactcgttcatgaatacaaattattgatctatatgattaagtagaaatcttatttattcatatctatgcatttattgtgataattttctctcctgtataaatttcttttgtaatttgtcgttgaaacaagaggtaaaaactaaaaattttactttctctaatttttttttgaaaagagatttcacaccacctctacttgattatcatttttttcaataaaatgactgccttcaactatttttaataaatttagaaccaagtgcaaaataaaaaataagcaaaatttgaagaaaaactaatttttttgaagagaaatttttttctaaaaaaaggttaaataaaaacaccctccaatacaaattgaatttttaaaggccacaaacattgtaaacaatgtgttaacaacgcaaaagccattaaaaagcccatttttgcgcgggaggttattttattggccttaattataaataaccagatactttaaaaaaacataattggtcggatggtctagttggttatggcatatgcttaacacgcataacgtccccagttcgatcctgggttcgatcaattgaactttatttttttctttttaattttttcaagtctttaattaaattatattagacagttcgctcactacacgttaaaattttttgacttgtaatactactagccacagtttttttttatttatactatgagtaaataaatatcaatatttttttacttttggggaggtttttggattttgatgtaatcattatttcaattttgtttgttacttatttatttttattatttttattttattttatactattttatcttatcttatctgataacactttatttcaactgaacttctattgttttccttttctgtcaatcttttaggtaccggctttattttgttcaattgtatattatttatttatattcgatatatccaaatacctatattatcgattcttcaatcatggatgccgctcaacaatcgtttaattctttactacaatcttatatatctcaacctcctcaaatggatcaatcaattgatagaagacgtatagaagtactgttacaaataaattcagtacttttatacaagtgtattatgcttcaacaatttgtattgaatcaacaaaatgtttcagctcctgattataatgaaaaaaaagatttatatcaaaattttttaagaagaattcattataatttaacgtgtcttgcatcaattaatgatatttattcaaatagtacagctcaaaagaaaaattatactctacctcaaatcgtatttccaccttctgaatgtccggaattatttgatcattataaattattgaatcaactttatccagaagcaatgccatttttccaaaagaaaatgttattagcaaaacaacacgctcaacagacacaagcacaagcacaagcacaagcacaagcacaagcacaagcccaagcacaagcgcaagcacaagcgcaagcacaagcgcaagcacaagcgcaagcacaagcgcaagcacaagcgcaagcacaagcgcaagcacaagcgcaagcacaagcgcaagcacaagcgcaagcacaagcgcaagcacaagcccaagcacaagcccaagcacaagcgcaagcccaagctcaggcacaagctcaagcacaggcgcaagcccaagctcaggcacaagcacaggcacaggcacaagctcaacagatgcaacatatgaagcaaatgcaacaaatgcagcaaatgcaacagatgcaacagatgaaacaaatgcaacagatgcaacaaatgcaacagatgaagcaaatgcaacaattacaacaactgcaacaaattcagaattcaaatattggaacaccagattcaaatatgagtaattcattacatttatcaaataataatggtaattcaaattctaatactaattcaaatccaacaccaatgaatatgaataaattaccaatggatcaatcaaataatagatttacaaatacaggtaatatacaacaatctggattgaattctaatttcaatcataattcaccaatggatcctagttttgtgaatttccaacaacaacagcaacaacaacaacaacagcaacagcaacagcaacagcaacagcaatcaccacaacagcaattgcaggcgcaatcacaacaacgtggatatatgaatgataattacaacaatttcgaagttgctagaagatcatccaacaacactcaaggaaatacacctcaaatcactccacatgcccttttgaatcaaaataccattacaccaggacaacaaactcaaaatacacaggagttttcaaatgttatgagtcctgaacaaattcttgctagagtttcttccggtcaatcccaacaaccaatttacaatggacaaacagatactcaatcacaaatattaccacctcattctccacagcaacagtttaactcaccatatggttcaaataatctaaacaattcaaatagtaataatcaatttcaatcttactctcaacaaggtagtttcatgagtggctggtgattatagattttaacaaccatatatattaatatacacacaattttcacattcctggattaatttaatacctaaattatatagacatcttacgaattcatgttttttttagcttatatacactgtaacattaattgcatacgatctataccatactttaaaaacgtgtaaactttgaaccttaaagttatatgtgtgtccactcatgatgaggcgcatgaaaaattatactaattattaatcgattctacacgattccctgtgcaataacctcctttttttttcaacaagagcaataatgggacgacgtaaaagtggacttgaactaacagcatttaatccgctgttttatgaatcagatattggtaaaaattcatataatatacctgatgaatatgaatcaatacttatagatatttatacccaacgtacggcagaaataccagatataattagtgatcaaataaataatatacttcaagaggaatttaaattaccaaatgagatattaccaacaaaggaagaacttaagaagtggacaattgatggtacaaatatattggattttgaaaaatggttatataatggatatttttggatgatattgagtgaaaatattgatgatgttgatattatttggaatgatttatggggaaatttaaataataatgataatatggacaatatcagaacaaagaaattatatctctctgatattaataaattaaataatattggtaaacttgaagctaatgcgatcggtatgcttcatacagctggtaatggtaaattatatgttacatacgttgacttttttatattattgggaagacttgggatattacaaatttctaattaaacaactttttagtatatcaaagtgtaaataaataagtatatgagtgaatggatatttgtaaattagttaactataaaaagaattgtcttatacataaaaaaattataagatatgtttagacttgaaatagtttctaagataatgaatttgataaacaccaactgagactaagaggaaaagacctgcaataaagaaatttctgactcttctattagtactttcatttgtatttcttaaacgttgttctctactaattaaatattctaattcattaataatttcatctaacatttcatcaacttttcttaattgaacttcagaaggttttagtttttcagcactttgaattgcattccaatctctagcatttgcaccagcttcaacttcaagttcaatttcacgtgataattgacgaccatttgcactataaccaggttgaagacgatttgtaaagcaaatatcaaaacttgaagtttcatgtgcactaaatgcaattttaacattacctgcaatatcatctttacgacgatattcatcaccatctgcatttgtaatttttaatgataaaatttgtccatcaccaactctaccacttgaattaactgtaaccactactaattgcccatcagatacaaattcacgaacacattgaggctcattgttatgagacattgcaggaatttcaaaacgtaatgcccatgctgcattcatgtatacaaatagtaacgctaataaggtataagcacgcattccagccattgtaattgtttaaataaagaagaaagaagaagattgtcaatgacacggtattaaaatatatctgatgcatgaaaattataataaacacagcactctctcttttttttttgtcaaaaattggacaaaaaacacgtcgccaaaaaatttcagtactagaacccattttctcatatagtttttgctacaaagtcactgtatcttcgatatatacagccaaagatgttcaacaagttatattaaataaaaatgtactttattttgattttagttttatgtgatataaaataaaaaattatagttttactacttacatatcttcttctttcttaactggtgttggtgcatcccaatctccaactgttggtgtaacaccccaatctgcatctgcatcagcaccaccatttccagaattcttgtaaactgatgctccaccccaagtactaccacctccattaccatattcactacgaccaccatcattaccccatctattattacttctattacttgaccaacttggagttttaccacctgctgtattactacttgaccaacttggagttttaccacctgctgtattactacttgaccagctcggagttttaccaccagatcctgcacttgaccaagctggtgttttacctcctgccccagcacttgaccaagatggagttttaccacctgtagcgtcccaacctggagttttaccaccagctccggcacttgaccaacttggggttttaccacctgtagcatcccaacctggagtctttcctccagcatttccacttgaccaacttggagttttaccaccagttgaagttatactattcataccattatttggtggatatttattattataaggcaatctttgattattgaaactaccatttggccctgttggtcccgatggtgggaatggacgtgttctattactatgatgatttttacctctgaaattttccagaaattgttcatgtggaacataattaccaggtcttaattcaaataataaatcagatttactaattggtataatttttgcaggattatgcatttcaactcttgcaacatcaccatttgcatctttaataataccctttttacccttatatggaccttttctaacactaacatgttgactaatagttatatcacgtcccccaaatcttgattgatttattgttgctaaatttggtggttccatcattctatttggattacgatcaggaactttaaatgatgaagcaattgaacctttattagcaattgtttgaacagaatttgaatcagtaacaaaaataccagtgttttcataaacattctttgaatgtaagaataaataagatttgtaaatatgtaaaatattaccttgtctcttttcaccatttgattctctaacaacatcaccaactttaatttctaaaccatttctatcagttgtcttttcagtcattttattaatacttaacactgacataatattttttggttctaaatttaaaactctaccatctgtacataaaattgtaaaaatttccttttcaactttaataatcataccaattttattcgaacttaaattaaccatttgatgtaattcaaatctaccaacttttgaagcagttgttgatgaatcaacagatctaactaaataatttggaaaaactgtaatatcttttttagtttgatctgaaactaatgtaacttgattatcagtaacatcaacaattaaaccactttcatttgtatgaacaccattgataattgtaacatgatcaccttgtaagaaaatttttcttaatgaagtagttggaacttcaacaactgtattatttaattttaaactattttcattaccttctaataaaattctagcaattttagcatcagcaattgttaaaactttacctttcattttagattgttcaccactaataatttcaactctatcatttggttggaaagtaacttgtttactatcatcaatttttaaagttgaagcaattgaatgtaaatcaataccatcagtatcattatttgaatcaaataatgttaattcatgtaaagttggtttgatattttgtatttgtagttgagtaattttaatatccttataaaggaaaccattaatatattcttcatttctgtaaatgaaataatttctatcctttttagcagttgttaaatgttgataatcatattgttgagcttcaatatcagagaataatctttgaggaggtctaatttttgatgaattataattaattgatttctttttacctgttacaggatcaataactgtattattacttgatctaccataatctaatcttggaactaatttaactctaacttccatatcagtttcagctaaattatcaacaatacctaaatcacctttatatctaccagttttaatacgaacataagaaccaggtttcaaagtactttcttgagatctaccaggtcttaataaatcaggatattcttcaattggaactaaaactttaccaacattattataaataccaggtaaattagctaaaatatgattaacggcatccattcttcttgcttcaatatagatataaccagtgaaattatctctttggaaaactgagaaaacttcttgggtatctttcatattaaccattctagcataaatttgtctgactaattctttttctttaccatttctaactctaacaccccagattaaaggatcatcaatagaaggtaataataaacgttgagaaatattttgggatgaacccatatatcttgaagaagatgaacgaccatatctagctttaaattgatcagctaaaacttgagcatcttgttcagccagtttttctcttgatctatctaattttctatgagatcttgaagcttcattttcagcattttcaattgtttgatcatcagctaaaaattcttgacgtaaaagcagatcatcttcatcatcttcatcttcttcatcatcatcaacttctgcttcaacatctaagaatcgattacctgcagttttcttcttctttcttctaacagtatcttcttcatcatcttcatcctcttcgtcatcctcatcatcatcctcttcctcctcctcttcttcttcttcctcatcgtcttcatcttcatcttttttaacaatgcttttagtttcatcaagagtatcagtatcatcttcagccttgactaaaggaatatcaacatcttcaattgtaactttatcatcatcatcagattttttaacataagtttcagtaaaatcaccatcgtcatcaccatcgtcatcatcttcatcatctaaaatatcagtatattctgatttaataacaggtttaatatctgattgagatttaatatcagttacatcttcaaaatcatcatctacaacttcactagtgttgttattactagcagcatcagctttagatgaagaattatcaataactgaggaagatgaatcaatttcagtatttgtattattattaacaatatggttcggagattgagacatattattgatgattacagagcattaacttaaaatttatttgaaataaagacaagttacaaaataatatattacaatacttatactatatttacagcatgacccaaataaagttaataaacaaacaatagagaagaaaagacgaaaagaaacttgcaagtgaaaaaaaagagaggccaaatagagcctgagtcctcactcctcagcatttatttgccttcctgtattttaattaaattagtaaaatattaatatacgcattggggagggtaactattttattacgtaagtattggttattggttatatatcggtatatagtgtatagtatagttatatgtacaagtgatatttcaatatatctatttctttttccataagaaagcacctcttgaaaaatctaatggttttggttgttcacctttacgttttttactttcagtgaaaataacgtgacgttgaacaactggatcataacgtacttgagtaatttcctttgcagttcttggaactaataaagttcttctatatcctgtctttgcagatgaaacaagttgtacaatagttgttctagcctttgcctttgccattatgtgtgtatgtatataactgtgtgtatataagacctatcaacagaaagagcagcagtaacactaatttgatgttcttcaaaatttgaaaaattgaaaaaaatcatgcactccactaaaatcaaacactgcgccacatcagttattaacaccgcttactgcgccaccagtactataaaataaatttccggagttggagttcccctcaaaaagacccttgaacatgtccctagaagtgggcttatcaacgtttttcattttatttattagatgtatttaaatagagataccgccttaaagtatataatttactattattttgaaaattgtataaagaaatcacaaaattagaaactaaaataaaaatggatctctatattgtatcaccaaatcttaaaattcaaaattgtgaagattgtccttctcatgatgtcttagtttcagctaaacataaatatttatgtttaattcataaatctcaatcaatgtatgattcattagttgaaaaacctgattggtgtagaccacgagataatattaatgaaaaaaattcaatgccaccattagtttcaattattttaaataatgatgatatcccatcaacttcaaatgtaccttcaaattcttcttcaaaattttttaataatgatttcaatagattgaatataccaaaatcattttttgaaaataataataataataataataataataataaaattattgataagaatttaattgatcaattaactttaaaatatatttacattttaacagatttatcatatcttaaatataaatatcttaaatctcatattaaaattaataatttaattaaatcaaattttacaaataaagttgtttcagaaaaggaagaattagatgcaattaatcgaataagtttagaaactgaaaaatttcatggattagaatttattataatgcgtttggttcatttacaaaaagttttccaatcacattttcaacctttaattgatcaaatacaagtttgtaatattaaagaaaagaaagaagaagcaaaagcaaaagaaatagaaggaaatgctagtaactaaactaacacaatagcatcatagaataaattttcgcgtcaaaatttaaattccaaataaacttccccctttcatcgaattattttgattttgattttgattttgattttgatccaattgtttttctattttgctttcttttcagtatttcatcttcaattttacttatttaacttctttttcttatataacattgctttctaatcatccatttctatgcatatttaaataccccccctttttcctttttaattaatactcttagcataaccataaatagcaaataataaataataagcaattaataataaacaattaataataacaattaatatactttaaatgaataaagaaaatagaaaccccacgtcattcgctcgaaaagcagctaaaactgcaattatacgctctaataaaaatccagaaaatgtactaaataataatcaaaacaacaacaataataataataataaacaattacaaaataatcaaattgacaaagttgtagaatctgtcgttaatgcaactaaaagattatctcaacaatcaaatcattctaactcaagtaaaatgaaagtagagaatagagttggtccctggagattaggtagaactttaggtaaaggttcaacaggtcgtgttagattagctaaacatacaggtactggtcaattagctgctatcaaaattgtacctaaaaatataatagattttaatatagataatgatgataataataataataatagtaataacaatgaaaataatcctaattcaaagaagaaaaaggccaagaagccaaaagttgatgagaatggtttaccttatggaattgaaagagaaataattataatgaagttaatttcccatccaaatataatggctttatatgatgtttgggaaaataaaaatgaattatatttagttttagaatacgttgaaggtggtgaattatttgattttttaattaataatggtaaattaaatgaatctgatgctgttaaatattttagaatgataataaatggtgtatcatattgtcataaattcaatatttgtcatagagatttgaaacctgaaaatattttattagacaaaaatggtaaaataaaaatagctgatttcggtatggccgctttagaaactcaacaaaaattacttgaaacttcttgtggttctcctcattatgcttcacctgaaattgttgctggtaaaaattatcatggttcaccgagtgatgtttggtcttgtggtgttatattatttgctttattaacaggtcatttaccattcgatgatccaaatatacgtaaattattacttaaagttcaaacaggtaaatttcatatgccttcaaatttatcaaatgatgcaagagacttaatttggtcaatgttaagaattaatccaaatgaaagaattaaaattgaagatatttctaatcatccattaatgctaaaatatcccgatgattcaattaataatgaaattgaagataaattagatcatttagatatttctgttccagtatccaaaatcgattttgatattttaaataatttgaaaactttatggaatggagtacctgaatctcatataataaaaatgttacaaaataatcataaaaatccagaaaaaatgttttactatttattagaaaattataaattaactcatgctaatgaatcaaatttaccagatttaaaacactcaatttctaagacaactctgagagtgagtagttataccaataataataacacatcatctgataattcaactaataattcaaataaaaattcttcaagaactacaaaaccattaccaaattctacaagtactgttataactacaatttatgataaagatggtgaagttttgaaatctgaaagtcaagagataaaaccaataaatactttgaaaaagaagaaatcatcaaatactaatctaagaattgttgcatctacttcgtataataaatctatctcatttcaaaagattagacgtgatacatctgcatcaacattatcaattgttaatatgtcaagaaatttaagtatattaccagattctaaccattatttaccaagagatagacaatcaagtgtaaaacttaataaacatatagatcaaataccacctttaaaatcatatactatgaatccgaaagatttacctgaattaccagatcttaatgattataaatatttagttaatagtatttttgattcaaaatattcaaataaagatttaacaaataataaaacaaatgatgataaaccggataataagaaattaaaggaaaaaagtagagttgaagatgatataattatacttgatattgctgattcaacggatgatccaaccgataattcaacttcaatggatacttcttatatttcatccagagtagatacaactgcagaagataccgcaccaatgagcaaattagagaaattaagaaatgatcttggaattacaaataataatccacaaaataattacagaaatttttcaagtttaaaatccgttagatcatcatcaacaagaagacttaatacgtttttacaagaggaatataaaaatgttaaacttaatgatttcagttcaattcatgcaaacagtactgtaaatactcataggacacaaccatctgttacatattcacataaaacacaaaaatcaataacattatcaaattatagtttacattcagcagttgaagttaaaatgatgtcaccaacgttagaggaactgagacaaatgaatgaaggtagagtatttgaagatgctgatgaatctaaaaagaatttgaatttgattagtactgaaaatgtttcaactattcataaaaatattattccaaatgtaaatataaatgaaaataggaaatctgaaattagaaattcattactaactgaatctacaaacgatgttgttcagattgaacccaaaatcaatgaacatacatcaaatgataccaatgaacctgcaaattcagtgtttgcagatgctgaagaatacccaaatttaacttcagaattacaagatacttttgacacagaaattactggttcattatacacctcattagaggaacaacctcatgaatctgaaaataaatcaggagagaaattagttaagggaaaggataaaggtattagattatcaatgaaaccagcaatttacgatgatgctgataagactaaatatattagacatgcacctacatctccaaatccacatccttttagagctgctataaacgaaaatcttaatgttgttgattgtactgttggatcacaaaaacaaaccaataatgcagaaccaaaattacaaactaacaattatgttgaaagtcaacatgttaaacctgctaaaaaaaccaattggttcaaaaaagtttttgcagcattgaacaaaaagtctcaaagaactgataaacaaatcaatgataacactaagaagaataaaaatagatcatcatcaatcccaaataaaagtaaggcacaaagagcatcaacatttttcaataatatttcatcattaaaattcaatagggctacttataaaggtaatactaattcattgttcaatactgaatatttaattgatagtgatatagttacaaaggatgcattagttgagaaaattcatgaagattcaagaacacaaatactcaaattagttaaaacagaatctgcaccatcaggtcataattatattttcgaagtatcaaatcttgatactaaatttgcagttaatattattgaaaaagttggatcagaatatggatttggaggatgttacattaagttagttaagttgaaaggtaataaaaaatcttttgattattggtgcactatcattaataatattattttggaactggaaaaaatggaacaattatagacttttcttgaataaataaacgtactttaaactttaaaacactcatgtaatataatattctagaaattaatattaatgttgtattgtaaaatggatatgattaaggtattagtcgattatagtaaaccctaatctgtgacagacattataccggatgacttaatagttgagttgtgtcgtaacgtttttctttctatttcttcttgttaacattgcggagtttgtttaccgttccgatgaaagtccggaaaaaagtttgcttttctggcaccattttctgtgtactgaaaacgtcattgcaagtatatttacctgcttagtgactacaatttatcaattactatagtgaggattcggtttatatttgccatccaggcaaccacttcttgcaaacaacatgtggggtttaccttttgtaactgtaactatattttatctaatgtaacgttttgttggcctaggcataggataatttaatatgacctagccttttgaacaaaaaggattgcccacattgatataaatttgagaactcaaatgttaagccgcacaagttttgttttgattacagccgttcagaaagaaattttggaaaaccgttgaaagtttaactaatgcccttttttcaaattaggaaaaattcggggttagcatttttaagagtttttgcctatttaggcaaaacttcatatattttttgatcaatttttttataaatccgacataattagttattgtgtccctaggaagatgtaattatagtttgtaatttgaaacaacccaagtttaattgtaagagtttcagatttcaaattttacttaaatttgcttacggcaataataaattttgtgtgaaaatccccgatgttacatatacacataatggatttcagttcaaactttctcttatcttatcggctaccaattaaattgggagcttatttgcttggttatgactttgttatcagcaaatcaatatttgacagcaaaatcataagaaggattgttacttcaacaagttgtaatttgtaaactccgaattttatacgctcttacatgtccatagattgaatgataaatactcgattatttataaagaaaatctattcgaaattattggcaaaatatacggtaaaatgccttcttatttgtattgtgtataaaggttgtgttacgataaaggtaatgaaatattgatcttattaccatgatttctctaataggtttggtgtcactaacaatttgttttgcgcaatatattataaacttaacattattttaatatatagctcatcgcaaaagttttcaaaatccactaaacgattactttattcgacagtttataggggataattgaaagcttcttctaatgtttgaccgttaaaacaggaactttaaaagtaaaaagtaacattaattcctttttcacatagaaattatttaattggcatttagtgtgcggcttataaagaatattttttacgttcctttagattctgcggcgtattttttcaacggtattttcacgtttcttttttttgatttcttgatttctcaatttagcttataccagctgttatcctttttttttgactttcctatcgatgatgctgtttttcttagctctttccttagactcttttcgttttttttccctttttttgctattcaccgatcaatcattcaattgatagtatacctcaaggttcatatattataatctacaacacacttacacaactacttaatcatccgattattatatctaacatttgaaggttattattatcaacttataccatctatatatccccattcgtacattttaggtctgaatttgcttacattttttttcaacactttttaaataatctgctcaataaatattaaaacaatctttataaataaaataaaccatggaaataccgaccgttagaattgtcgttgccggagatctaggaacagggaaatcaagcttgatcaatttttatgttcactccatttttgctactgaatttgattcaactattgaagtcacacacaaaaagcaagttaatatcaatgataaactttacaatatagaagttgttgatacagttgacaatgaatttcaaaatgaagaacaaagaaaactattatatcaaacttgtgatgttattattttaacttatgctattgatgatatggaaagtttcaaaaatttatatctgagatatgcaaatctgccaattaacgaagaagatggtgaaaaaaagcttacatatctgaatggtagaataaaatgtttacctccaataattgttgttggtaataaaactgatttagaaatggcgagacaagttgattttcatgctgctaataaagcatccaaagagttaaacatacctacttttatgcaatgtagtgcagcaacaaactacaacgttgatgaactatttgaaactgctattgaagctggatataaatattctcaacttgatcatgatatgactcatatatatgctgaggaggaagatagtcagatgagaagttcagatagaagaaataattctagttgtagctcattagcttcaagacaaactatgcctaataatcaaaactcttcaaataatagtagcagtagccctgagggtacttttcctagaaatcaaaaaggtggcagaaagattcaaagaattcaatcaattaatgaagatgatgccgttatatctaacaacatagaaaattcattagaacaaaatacacaagctcaaacattaaccaccaaagtttcaaatacaaaaccaaaacaaacacctaaacatgtttttaaagcagaaactaaaccaactaaacattccgattattgctgcaccattatgtgatgcattgtatattgtacaatattagatttttttgtaataagtgttgatttatttttttgctaaagctagcattatttttcatttttatacaattttttgttgtgatcactgttttaatcaacttttagacaaagcaatcaatctttaaagggtatcacacatccacttattatagtatatagttcaagaagtttatgttaaatgatttgtttcattgtgcttccacttctaccatttttatagactcgattatatattacatttgagttattgtgctatatcaccacttctttatagacttaatttattaacttgcaattttttttacattaaatttttcccaacaaaatattaacacgaaagcaataataagttacttacatccaatctggctttattaacttcattcaccttaaattacattattaatatgatacacgagaatgactattgaaccgtgatagaaaacaacgtgataaattacgtcgtgctgatgaaagattacgtgaacgtcgtatgcgtgaagaagttaataataattcaaatagtaataataataataaggaaaaagatttttcaaaaccaaatactcatcgtgtacgtacatggattgatagatcaggttcatttaaagttgaagcagaatttttaggtgttcaacaaggtaaaattcatttacataaaattagtggagttaaaattgctgttgcatgtaataaattatcaactgaagatttagaatatgttgaaaaaataactggtacttcattagatcaaacccatcatcatcaacaacagcaacaacaacaacaaatgtaacaacggcaactccaacaacagcaacatctgaaattaaagaatcatcatcatcaacaacagcaacaacaacaacaaatgtaacaacggcaactccaacaacagcaacatctgaaattaaagaatcatttgtttatttaatggtgtttaataccagtgtttaaacatacctaacaatgtgctatgatgtatgtattttcttatttaattcattattcattttctttaagacaaatagaatttgtttcaattattggtaatctacattctagctcaatttaaattaatttttacttccagtttgattgtatttggtaatgaagttttttcaacattttctgaagtttagataattttattttgttatgtatatttgcacttgaaaatgtgttcaataaaggaggtcaatcaagcttataaatcacgtttaagttaccaagctggtgatgtttaataactgaaatcaaataatactattagaagtctaaaatgttgagaatatcttgcggtctaacaaacatgaattcaaattcaacggtgcttccaacagtaatatttacaggatctatttttagagacagacatagtaccttatactcaatactctaaattatatgtatctttgaaaggttttattcctgaaaaaagaattggttgtggctaatttttaaagaatacgtaaattttgaaacaatcgaaaaaactacataaatattcaataccaccgttaatggttgtcaaagtaatttataatcaagtcaacgtttgctcccacaaattgatacttcccatgaaaaaaagaaatttgccgtgacctgaattatgcgcggttcctggttgcatctcaaaaaatgacgtttttcagttgagagaatctttcttccccagtatcccaaaataatgaattaatattgggaattttttacaggctaacgaaaaaggttgggaacttaatgtctttacatgaaaaattaaattacatacaccagttggtatatctaaaattgataagatgttaatattagtaaattcttagtatcatgagtaagttttgtaacatagtacttgaaactctttgaaattttcataattttcataattttcatattattatgggaccacttatgcaacaaactcatataaaaagtaaactgttgaaactccacactaatcagtttacttaatagaagatattgaacggatttatcaacacttatagttaacaagttaaatgtgaccgacatgtttatgtaatcaattatctcggttactgacggcatgcaacaaaattattttaaaaaatgtttcggtaaagcacggttaattatggttattaatggacttttttatctttaagccttttgtagccgaagtttgtaaaatgatgaagaagtatctttgtgttatataaaaagctatacattccccccttttatcattattttatctagagtatacttgttataattattttaacactgcattactcttccaattctgttgaatttaagttcaaactttgaattaactttaatttcattcttttattaatttattaactaaccctcactcagtatattagaaaccctttccactttgttcgggcaaacggatatcccacttatattttacaaaagtgccggcggtagggttaatttttgaattccgatttccttttttggtgtttcggcaatgctcgcaaatttattttttcttattttacaataagttaattatgaatttcggaagtgttgcgggtctgttaacccgtttattattacattgtagctgtaatttacgtattataaactaccaaattacactgtaaaaacgactctttagctagaaatatgtatttgcaatgacccttctaaaacaaaaaatgaatcaaactacaatagttcttatcagtgcccaatttccccagacttgatattggaaaaaaaagataaacaagtcttaacctaaggggcagaatagagataacctcagctttctccgttggcggcatgaaaaatttgtcaaattattttgcagtcattttcaataatctattttttgtggagagaatttgtgaatgattcataatttacaattgagtaaaactcccttaaagtaggtatttaagtgcttttattcctgtagcattatatttttgtacatctgctagtatttctatctttctattctattttgttttatattttaaatttttactcttattccaattccaatcgaatatataaattacacaaatgagttctaaagctagtatagagctaacttcaataaaggcagattcaagttccgcagacatagagtctgctactccaattaatgatctacagctgccgttgagtgaaaaaaatgcaaaagttgaacaacttgctcaagaacataatattaaccataaaaaattaatgtggaagatcgacctttgtgttgttcctccattctgtttattatactttttagctttcttagatagagttaacatatcaaatgccaaaatttatggtatggaagaaagtttgcatttaacgagtaatcaatattcagttgctttaaccgttttctttgttccttatattgtctttgaagttttatcaaattatatgttgaagtcaattaaacctcatatgtggttatctgcaatgattcttttatttggtgttgttacaatttgtatggcttattcaagaaattatggtggtatagttacttgtagattgtttttgggtatttttgaagctggttctttcccatcaattttttacattatggctaacttttattcatcagcagagtcacaaagaagattctcattctttttcagttgtacatgtttagcaggtggttgtgcaggtgctttagcctatagaattcatgatttagatggcacacacggtttaaaatcatggcaatggatttacataattgaaggttcatttactgcaggtttagctatattattatattttattgttccagattttccagaaaactgtaggttcttgaatgaaaatgaaagatcattcattaagaagaagttagaagtttattcaggtaattcaggttttgaaattaaacaaacttggaaagatgttggtaaagttatgaaagatcctgttatttatatttgtgctatatgttacttcagtttcattgttcctgcttattcttatgctttttttgctccaactattattagggatatgggttacgttgccatggaagctcaaagtcattcaatttatccatggttagcatcaatgggtttcagtattatggttgcatatatctctgactacctctacattagaataccatttgcaattttagcttgtttggtttctatttgtggtttcggtatggtaattggtgctcaacacgaacctcttgttagatacggtggttgttttatgcttgcagcaggtttatacaccgctatgccaatcttaatttgttgggtttcattaaatttctcaggtcatacaagaaaaagtgtcggtactgctttcatcattggttttggtaatattggtggtattgttgcatctttcattttccctaattcagatgctccaagataccttaaaggttttggtatatgtttagcttttgttttactagcattaataatgtgtttagtatactgtggttacttagcatggttaaacaaaaagaaacagacaccagaatatagagctgcttgggaacaattagattcaagagaacaaattatgaaaggtgatctgaacccagatttcaaatacttatactagttacttttgcaataattaactttttatcttttttactttcttttatgatgtactttttttatatagactaattaacctaattttcacgatacactgaaaaagctcagtttcaaaacgatttttaaactttaaaagaaattaaacagtgctgggacacaacttaagctgataaatgcaaatgcattaaccaagtctttaaaaattcattacgtcaattttttaacaaaggatttttaaacttagtatggattgttccttaactttatttgagaaaccttctctcaaaaatgataaaacatattattaatttgccgcattaggaaatttttacaaaccagctataattttttttttttgattttcccgtcagcttgttcctgggaatttggatattggattattggatattttgagccaactgacacaaattgtttcggaatctaagtttcttgattcaaacaatagtaaccttcctttgttttgtttcattcctttcaatcatttgtgcaattaataaaaaattagtttgcaaatcaacttctgggaagttataagataagtttcgaatcttaaaatacctttaaagatagtgcaaaagacatcaaaatgtctaaattacatatcaaaactagagcaacatttagttggggaggagatccaaggtccaatcaattgggttttatggaaggtgatgttattgacattctgaaagtggtgaacgatagtgtctattttggagaatcacagagaactaaattgaaaggattttttccaagtgattatgttgataatgaacctataatggacgaattgaataaaacaaataatagttctactccctccaccccgacttctatcggttccaaaaataatagttctaattctctattcactttacgtaaaaaagatacgatccataattctaattcaaacacagacatttccacattaatagataacgatcgttcaaaaagtctacaaaattcagagatcaaaaacccagaattaaaatcatccaaaaaattcacatcatcatatgttcaacaactcttggattcttcaacgttgagtacagatacaaatacttcatcaacatttggtcattctgattttagtgcaacttcagctggttcttttatgcgccataaggatgactatgaatcaaagttacataatttaatgaattctaatattcagtacaatacttcaacgcgtaatgcactaaatgatataatagagaagaatgaaaagaagaaatcatcatcaaatttattcaaaaactttttagggtctagaattgatgaaggtccaagttttgatgatcgaatatatctttcatctgttgaaaaaatgagtcaaatgaacataaatgatgcatcaatgtatgagcatcaccagtatactagtccagcacaccaacatagtcagcaatctttaaatttctcagatgctgaaagaacaaaaacaatttcaggtcacgacagggcaaaaagaaaggaaagagttttaggcgaacaacctgatctgattttaaagccacaagaatgcattaatcatgttaattatgaagaacgagatgcatcggctttaatgaatagaagtgcaagctataatttagatagaatggatttcagtaaagtagatcgttacattgataaaattgagcacaatccatatgatagtccacaaaaattcaccaaggagacaattttaagaaagttcaaaagagaatctgaagtgtgccgtgctatttacaattacttgacgaaaaactttagtttagtcactagaccagatgaaatcatcagtactaagagaatgtttgagtctcataaattaacagaaataatgcactcaaaaacttgtacacctcaccaactaacgtggatgttttatttgatggcagatacagcaggtttggaagtagaaattatcttaggttatctaaaacacccatttgttctgaatgaaacgatcactgatgctaaaaaaagattgataataaatcattcttggattagtattaaagttgatggagaatatagatttgttgatgtttctttaggtaatccaacaaacgaatttagcaatgaatattctgaaatatgggatactagctctacaaggaaattttattttctagcaagaccttttcatttgattcatactcatagtcccagatttattgatcaacaacatattgttccaccaattgatattgttgcacaattatcattaccaccactttatccacattcaatgattgaaggtatttctttacataaattcaatactagtttatttcatctaaaagatcttgaactatatgattttgaacttgaagttccagaagattatattgttcaaggtaaatttaaaccatatgacgaaggatataacactgaagattcctttgttcaattttattatagaaacaataaaagaatagcacacttccaaggtataatgtcaaagaattgtccagttggttttgtttatgttactggtaaaagtgagttttcaagaaaatggaatttactgatgagtattccttgcttccatcaaggtaaatggaaacctttacaatgggttaaaaaagtaccaggattgaatggagttgatgtttatttaaaagaaccaaaaataaataatcttaaaatgggtgagcaaaagtttgatattagagttttcggaaaggctgattgggttaaagaagttaaaaaattctatcatggtgttttaaaattgggactattttctcctagtaaagatatcatagaacttgatatttatgaaaacaaatatacaggcaaaattaatttaaatcaacctggtatatggaggttaggtgtattagatgtaaagcaaagaagatggaaaattatatctgagtggaatattgaatgatgaaaaagcattataatgaaattagaagtataaagtttatagacatacatctttaataaatagtcaaataattaataattaatctcgaaaagaaacattataagtaaaagtagttaaaaaagagaaagctaaaataaataaagatgaaagtaaactgaaaggaaattatttcaaaagtaatacatgtaactttttattgaagtattaagttcatgaaatatcttccaagctatcttccatggcttctcgtatatcatcttcaatgagatgatcatagttaggaggaacttccagcgttcttaaagtaacttcatcagcatccagttcatcatccgtgaattctgcaggttgattaagctcattatttttcacaacttcctcaaactctggtagttctatatcttcaaattcacttgcatctagtaatacatcattattaatctttgatacaacggtggtggcatttgttcgcctcttagaggtcctaaagcccattttttaacattggcttcaatgaaaacatatcccatttgtccaaaattaacatcaactctacacgggtttatacttccaatagttggaaataattgaacattctttggcattcttacatgtccaccaacttttgattctgataattttttaccatttctggtaaaaaatacaactcttgtttgtcttctgaaacctattccaacaacatcacccttttcaagttgtgggaatgcattatatcccagtttaaactccgtcaaggggaatggataattatgtcttctatctccaactgaatcatatgcaacactatgtatgtaacgccctggtaagataaatgaaggataagggtatgttgataatcctaatgatataagtgtattattcttgaattcttcgggtatttgaaagattttgaactcaatataatagacatcttttgtatttggtatgggtaaatttgacttgaattgatattggtatattttttgttttaaaagtaatttccgttttattttcaatagtgattgaatgtctattttctggcgtttctataaattcccaagcgtgtacacctttttctttaatcatatcaagttgccagtttgctaaattcagtttagcaaatccatttaattttatatattcctttgcctgaaaagtaaatttcttgatcatctggagataactactgtcagtgctgtagtatcattctcagcttcttccatttcactatatagtagattagcttcatcattatggttatcagacaattcatcgcttggggaacaacaacatttttgcactaacaatacaaccaaaaataataaaggtattatcagaaatgatacagatacaaataagaatgataacagtggatcttctggttcctttgtatctttattgatagtaaaatgtgcatcatttatatcatctgataaggatttgaactgcactatgtcagcatcgctgttagctagataaggcattatttatggttatattctttcttgtaatactatacgggatataatataataatagaaatgttacctgttatttgagtatgcaacaatgaatatttgcctctcacgtataatctcagttgaacttcacctaatcaagcttgtacctttgcaaacaggacatataagcagcaagtgaagacagaatcattgtaaaaaaaagaatccacattttgtgatgacgatttctcacaaaaacaaaaaaaatgagttcttcgtctttactgtgactgaaatcttttaatagtatataacacgaaattttagtttggttatctctgtaaaggctttcatatacaatagatacgtatatggagaaagaatataccttctaaatgagtggaattgataattatacaaaatctaaaaagttaggtgaaggtacttatgcggttgtctatttaggtacccaaatatctactaatagagaagttgcaataaaggaaattaaaactgaaggttttaaggatggattagatatgtctgctattagagaagtaaagtatttacaagagatcaaacatccaaatgttattgaacttatcgatgtctttagtgacagtaaacaaaatttaaatttagttcttgaagtgttaccaagtgatttagagaaaatcttacgtgataaaaatattgttataggaggtgttgatgttaaacgttggttattgatgcttttaagaggtgtttatcattgtcatagaaatgggatattacatcgagatttaaagccaaacaatttgttgatggatagactaggaaatctgaaaattgccgattttggtcttgcacgatgtttaagtcaaccagatgagaaattaacgtcaaatgttgttactagatggtatagagcacctgaacttttatttggtgcaagacattatacaggtgcagttgatgtatgggcagttggtacaatttttgctgaaatgatgttacgtacaccatatttaccaggatctgatgatgcaaatcaattagttataactatacaagcattgggtacaccaacagaggaaatgtggccaggagtttcacatttaccattgtacaataacttgactatatatcctgtacctaccagaaatgaacttcgaaggagatttgcagctgctagtgataatgcacttacattactggaaggaatgatgatactgaatccatccaaaagatggacatgtgaacaagctctcatgagtacatattttgtagaggaacctactccatagattacatagaatgtttttaatatttggtagatcaaagatgattagtaaaacaccttaccttataattattaattattaataagaaaagacatctcgtaatcaggaaaattttttatttttcactgtgaaataaaataaatttcatattaaaaaattttaaccttgtcttacttcttttcaaaaggaaacaagacccaactgccctactaaaatggagactagatcaaacatattcacctgtaactcatgtcaaattcaattttcactttcagaagatcaaagaaatcatatgaaaggagaatggcatagatataacttaaaaagaagagtggctcaattacctccaatagatgaagaattattcacattcaaaagttgcagttcttgataaaaagaaggaagaagaagagagagattctaaattagctgatgatttaggcaatcttcaattaagtgctaaacaattacgtaaaaagcaacgtgaagaattacttgaaaagaagagaaaattattagaacttgcaaagaatagattagttagtaacggtggtcgtgttaagatgggagaggatggtaaaataatagttgaaaagaaggaacctactgtagaagaacaaaaattaaaagaagaagttaaagaagctattataaaagaagataaagaaaatcaagtcgatgaagaagctttaataaaggaaaaacttgcaaataaagttgaagttccagtcaccaaatgtattttctgtaaggatgaatcgtttgaaaatgttgaaggaacttttgaacatttattcaaaaagcacggaatgtacgtcccagaaagaaaatatcttcaaaacccagaaggtttattatcttacttatatgaaaaaatcggtttcggtaacgtttgtttatcttgtaactttcaaggtagaaatttccaaagtattattcaacatatgctaagtaaaaatcatataaaaattccatatgaaaatgaagatgaaaaacttgaaattagtgatttctatgatttctcaaagacttatgaagttgaatatgaagaaggagctaatgatggtgaatgggaagatgttgatgaagaagaattagaggaagatgatgatattgaaggtgaaaaattatatgcttcagattatggattacatttaccaaatggtgttgttttaggacatcgttcccttgtgaaatattataaacaaaacttgaaacctgaaaaggaatggtctgaaggccaaggtactgttatggctgctgaaactagaaaattcgttaatactattgattctaaggcaattgctcaacaaaaacgtgtttggaatagagaaaacaaaagtagagacagagatgatagacgtgctcaaaaattcattaactggcaacctcattatagagatgaattattacaatagttatgctgccatgatatatatatacttattactctttacttatctttatattctatactatacattgacgtttgctaagattttactatctcaatattacaatttaaaaacgaattacttgtaattgtaacgaaatttcgaatgaatgtcaacaccattattgttaatgttcttaacataatgaaaacaagcatcatatatacatttttttcataactttcaaaaaattgggcattatcaaacggtaattaactataagtttaattgattatgaaatccaagacctacacgttaatttttttttttgaattttcaagtctcctcgttaataatcgtgtggcagtttggcgtttgtttgtttccaactctgctcatatatctttttttcaattactaacatagatagtaatacaatccaaaaacataatgtactttgatctcgatgatatattagcagaatctcagaaacttactggtaatttccaaatggaagttgataatttagggtttttgatgaataatacaaataatgcaaaaataacaccaagagagaaacttgaactaccattttggctcattacagcactaacttttataacaattcatgaagaatctaaaggtacaaccagaaatattttttcagttgaaagacctgaatatttgagtaaacttgcaagtaatttttacaaagcttcaccacttaatgccgatttgtcagtcgtttcacatttttacaaaattgtacaaaaatggtgtgactttattgaacaaccagaattagttgatatagtttctgatatgttgattctacgagccggtaaaatcaatgacttatcatttaatatatcagattcacaatcaagagaaaatatggaatttttgcaaactttagataatcatgaaaaagaaatattgaaggttactagtgaatcatataatgatttcaaaacgtggttgaactctaaatgactcaagtaagagttgggaaataattgagtaatcaatagaagggacgatcagtacgatattgcgcagaagtctgctcctggttaatattgaataaactttctgggataaagttgaataacaatatattcctaattcagaaattacagctcactatcttgaacatatattctgccaattatgaatgctttcctacggtgtatatagctccaataatagagaaagcaatccatcgtcaacaagattacgtaacacactatatcaaggaacttaaatttttttttgaaaaatttcaattttcgttgacttctctaagccgttcttcttggtttatttatagatttatttatagctcttctgtttagctttcacttaaccaacattattcaaacatggctaagatagttgtattaatttcaggaagtggatccaacttacaagcattaattgatgcaagtacaggtgaaaacccaactttaaaaggtgatatttgccgtgttatttcatccagtgattctgcatttggtcttgaaagagctaaaaaagctggtattccaacaactattcatacattgaaaagttataacgctggtattccaaaagcaagtaagaagaaaagaaagagagctcgtgatcaatttgatgcagatttagctaaattagtcattaatgaaaatccagatttagttgtctgtgcaggttggatgttaattctttcattagcattcttaaatccaataagtaaagctaatattccaatcattaacttacatccggcattaccaggtacttttgaaggtacccatgctattgaaagatcatgggaagcaggtcaaaaagatgaaattactaaaggtggttgtatgattcattatgttattgaagctgttgatcttggtgaaccaattgttgtaaaggaaattcctattattaaagatgaaactgttgaagcttgggaagaaagaattcataatttagaacatattgcaattgttgaaggtgctcaagcagctcttgatgcgacaaagaatactgaaactgaagaaaaatcaaatgttgcagaaagtccctgttgttgcagaagaaaaaacagtcgaagaagaaactccagttactgaagagccaactgtcgaagaaacagttgcagttgaaaccccagtagttgcagaaactcttgtagaagaaaaaaaagttgaagaaacaccagtggttgaagagccagcagttaagttgcagaatcagctgtcgaagaaaaagttgttgaggaacctgtcattgaagaacctgctgttgaaaaacctgtcgttgaagagcctgttgctgaagaacctgctgttcaagagcctgttgttgaagaacctgctgttaaagaatcaactgcagaagatataattgaagataccccagttgttgaagaaacaccagttgcggaagttccagttgttgaaacttcaaactctacagaacaaccaactgttgaagaaactccagtttcaaagaatacaccagctgttgcacctaaacaacaagaagcaccaactactccaactccttctaaaacttcccgtacctgtggaatttgtactattatgtaaagaatcacatgtatttttaatacatagatccattgtatatattttattctatatataacagaaacattcaataaacacactgtaccaattatcatttcatctctatctctagctgtaacttgtaaaatactggaaagtgaaaataatttttcaaaaagctaagccgctgaaaaaccctaaaaattcaacaccgcggttaattgaactggaacccttctaataaccacttttggcattgcttgtagggctcaacatgaatattgctactgtcttgatctttgctagattgatatatcattattgcaagattatatgccagtgcttttataatcaatacacagttattaaaaacatgctctttttaatataaaaacagtatagggtataaaacaaagtatgttatgagcttagccgagttactcttttgggaaggtcaaggcggtgtcactgtacaagtgggacaaatttattggttgaaaaattattttatttatgataataaattcgttgaaaatcgtccataaaaatattcaagtataaaaaggagtgaacgtttttaacttctgtaattgaacttgaatttgaaagtttgttctctttaccttcttttcttttttttttacttttatctgaaataataaataacacccaaacaatacccaaaaaacaatgtctgaattaacacaccctatgattaaagatggctggtttgctgaagtctcagataccatgtggccaggtcaagcaatgagtttacgtgttgaaaaaatcttacatgttgaaaagactaaatatcaagatttacttatctttcaatcaactgattatggtaaagttttagttttagatggtgcaattcaagcaacagaaagagatgaatttgcatatcaagaaatgattgcacatttagcacttaactcacacccaaatccaaagaaagttttagttatcggtggtggtgatggtggtgttctaagagaaattgttaaacatgaatgtattgaagaagctgtgctttgtgatattgatgaaggtgttatcaataattctaaaaaattcttaccaggtatgtctgttggttttgaacatccaaaagttaaagttcatgttggtgacggtttcaaatttttagatgattataaaaatacttttgatgttattattactgattcttctgatccagaaggtccagctgctgcactttttgaaaaaccatatttccaactattatcagatgctctaactgaaaatggtgttattacaactcaagctgaatcaatttggattcatttagatattattaaaaatttaaaaaaatcatgtgcagaaattttcccaaatgttgcttactcttattgtacaattccaacttatccatctggtcaaattggttttatggtttgtactaaaaataagaatgttgatttaactaaaccattaagatcagttgatgcaaaggaagaacaaaaattatacagatattattcaaaggaaattcatgaagcttcattcgttttaccaaactttgcaaaatatgcattacttgaataaattttaaatttaacttaatattattttatattctttgtatgtgtgttatgttatataatgattaaatcgtagtctacaaccttttttttacttctatcttcaaattttcttgtatttaggcaagattatattatatgctatgtaattcaattagtttattgtaaaatattcatactataaaaagtttaaatctaagctacatcaacttccatttcttcaacatctaataaattccaaacactttccttaagaattgcagttgtacctcttgggaatttataattattttgtttctgttctctaacattaggtgtaagataatttctatataattgtgcatctttattaagttccataacacataaatcaacatttgaacctgaacctaaatcattccagatacctgcttgaattgcatcacttgctaatttcattgcttcttcctttgttaagttttctttccaatctttttctaaaactgccattgcagctaatgaaccactaccaagtgacatataaaatccaacatccgtactaccatgagcatgaatactaaataatccaacaccagttggatcaacacctgcaacaattaaataagctccaacatgaccttgatatttaaataaatgttgtttaagcatttgcattgcactaacaactcttggttctctatttgtatttaatgaatgtaattctaaatttgatgcaattaattgtgtaaccatctcagtatcagctgcagtacctgcacctgcacaccaaatttttggtgacaaacgatgtaacttttcacaatttttatctgcaacaattggacctgcagttgctcttgtatcagctgcaataactacacctccattaaatttacatccaacaatcgtcgtacctgttgatgttgcctttggagctttatatccggcttcatttattaaatattgattcctttggtaattgtcaaatttcagtcctgccatcttctatgtgtatatattgatgatagctaaagaagtataagatgtatgagaagtataaaatactgataagtttgccactgaattttaaatttaccaattggtgtaattaagatttcaattttttgatttctcgcattttcatgattccaatactttattttattactgttgctgctacttattactgttataactattttccctgtctgtataaagacattgtagatgatactgttgactgtataaataatatatgtatctgtactaactcttagtatatttataaatccgtagtataaaccaatatatcccctaattgtaccatatactcgataagaacataataaaataagtctcgcacctgctaatcttgaaattagatcttcccaaataacatcttaatgattagatttgctttacattgaaataatattgatacaaagccccaattaatatattataatagaacataatgggtgtatttttctcatgtttaaagccaatacagacacaaaatgaagaagaagatatttcatcattatctgatgatagagcaaaactaatagaggatgaattaagtacagaattaaggaataaacaattaaatgcaatccttaatagtacgaatgatcatttaattgatataactacatttaaaacaatggttgattatggatctacaacatctgaacataatgaacaacaacaacaacaacaaataaatgatggtgaagaagatgattttaatgatatttttaaagttacaccaatatcacaagaaatcattcaatcagagattgaaaaggaattaaaggggtggtcacagaattatggtgaaattgccgtacagaaatatttagatatacctgaaccaaaaaataaagagaaacttattatagattttgtataaaatagttttatattaagttagggttatttttatctatattttatattactttaaaaaagaaaagataatatacacaattattgtacataaattattgaaataagaaagtttgattaaattgtaataattcaacgtgttatattcaaccaaattttaacattttcaataaattcttgagatttttcaccttcatgacgttcttgacgattcattttttcatcttcattaattaaatcttcattaattatatcatttgatgtaacatcatttgatctacctcttaatgggaatggaacttttaaagtaaattcacaataatttaatccataacctaattttaatgcaaatttatttgcacaaaacataccatcttcatcagaatcatcattatgattaattgaaaatggtaaacctttaataactttcaccattaacacgtaattctgaaatatatttttcatcaataattttattttgtaaataaacattacatgcaatatcatgaccaattactgcctctccaggtaattgtaaaatataatttgatccaccaattgtactcttacctgcaggttccttaatgattgtttcataaattgatggataatttatttgatttaaatttttaacatcttttaataatgtaacataattatttaaattagttgttgaacaaattataaattttttaataaatgcagttatatcatcaatttcttcaattttacttgctttttcaatatcatgtttacgaataatggttggtatttcaacagttgaaggtggaatttctatatttttattttgatttatatcattattaatattgattattgttaatattggtggtttctgtatttgattgggtttcttcaactggtatattatctgctttttcatcattagcttcttcatcaatataactatcatcatttgttacagttttctgttttgatttagaatttgtagtatttgatttactactattactaccactactacttggtaattttttatccaatatttgtgattcaaatttttcaattcttttatgaaatgcctttaataaaccttgagcagatttaaaatatgaacctgatgtgaaaacatctaaataattatcaaacatcaaatttaaatcattaacgaattttttataaccaaatttaccctttgaataattaccattttctaatctttcattaattatattaaaacataaaggttcagttacaatatcatagaaatcttcagtatttggatcatcctttggtggtaattccattagagatttagataatggaactgaatttttatggtgtgatactttaaaatgataacagatgtttgaaatattttttgtaattcattagtataatcttcagtatcattttcatcaaattcttcatcttctcgatctttttcatctttagattttgattcaattttaaggtttctttgtatctggctttttattttcagatttctttgaatccgattttgtttttatatctgatttttcaactactagataaataatttttataatcattaattcttttcaatgcataatctttaataagatttgcatcattaacaattaaactttcaggatcattataagttgcagcatttgaactcattaaaatccacatatcagcaaattgatctaatgaaatttcaggtgaatttttacgttttgaaattgttgcttgtttaatttcatttattgaaattgggttttcaattaattgataataatctgcataaattttctttggtggtaattttataaatggacctgatattatttcatcggtttgtggatctttaaaattaattgcattatttattacatcaccgaaaaatacatttaaatttttaaatcttgataatgtataatcaattgagtcagaatttatatcaatattatcattcatatcttgatctacattattctcatcgccatcttccaccttatccccttcaccattatcattatcatcatcattttcttcaacagctgaattaatcagtcgttcagcagcctcagctgcagcttcatcaacagattgttgaagttcagtcttttgctttttacgaggacccaaagttagagttactttccttctaggtggcatagtgtattatgttctgtgtagataattaaatcaatatccaataagtaaacatccaagatcatcaacattaagatgctcagtgtaaacctgcaaaaaagaagaaatcttcagacgacgcgactgaaatagaaaccgtacaccttgaaaagcaataagtggggaaaaataaggtaaagtgaattttctcactttaatttgatgaacatgaatattatatgtagagggtataaagtatatattagatacagttgaattgatttagagtatttgttttaacttatcatccgattaacaatgtcaaaatacgaagttattgatcaagatcctttatttggtaaagttgtaagttatttccgtccaagtgattatttaacttggttaggtgcaacaattgcaggtccattatcattaattgcattagaaaaatatgaacctgcaactggacgtcaatttaaaatgccaaaaccaatgtttttacgtgcaggtgcattaattggttttacaacaggttttattttagcttataatcaatcaactaaaagattttggggtgtatctgaaaatttaagggaagttaaaatggatagattagaagttaaaactttattatcaaagggtaaaaatccttttggtagtgatgaatcaactttaacaccttatttacaggatgtttctgcaagatattctaaaaattctcaattattattaggatttttaccttggtttaattttgttaatcatccttatcatggaattgatttaaataaatattatgaagttagagaaggtgaagaaaattgggatcttaaattagttcctttagatcaaattaaaggtttaccaaattagagaaaataaaggaaaaaaaataagaaaaaatagcaaagtagaaaaatttcaaagggaaaatctttagcttttaattcaatttattcaaaatataatataatacaatgtatcatactattatattatcatattatcatatcatatatacttttacgtactaataaaaacaaaattatttattattcattaaactagattaaagaaaagattaaaatttactttttattaacttcctctattagagattgtaacttatttcgtattctttgacctccaattggagatttttcattatttttataataaagattccaaattatcatccattgatcaaacaatttatatttttcccatgattcaattgttaattcatttggattatattccattattgcttgattaatcattgaaaatcttaaatttaatattgaaaatttcataaaattttgattttcaatttcaattccatattcatattgtttaaatgtaataaacattttaacaatttcaaaatttttaaattgtaaattaacagtttcaataagtttaataattttattgaaaatattataatttgataaatctatttgattaagttgtttaatatttaatgaattatttaaaattattgattctaataattcccaatcattttttgatatcagattagggttttcattattaaaattattaaataaactaactaattgattaattctactatatttatccaatttgaaaggatttttaacatattgtaataaaattaaataataaatatcagtatctaaaatgtctaattgaataaataatgaatcaattgaatctatttgataattatttgatattcgatgtaataataaagattttattatagatttctgtatattataatctgatatttgacttaatgaattatgtaaataatcaagtaactgatttcttttcgtatttattgttaaatcattttcccatttaactaatttagctagttgaaatgaatatgttggtaatttattaatatcattaactggatttggtagggtatttttattaattgacttatttttattattatttttatatgaaggatagatttgtaaagtatttaagttataaatttgttcaaattgatgaaatttcatcattttcaaaacaacattagtgaaatcattatttgtatttgtacttatatttgtatttataattaatgtttctttgattgaaattaacttttcatttgcataatctttataaatttttgaagttttattaaatattgttgaatgattataatttttcaataattttgaaggtgaaagcattatccattagtgatatttgaagaaaaagtaacgatggagaagagagaatgatttttttaatctatatagaaaaggtttattattattattattattattattattatattataaattacatgttataagatacatcatactcttaacgagcctcaaattgtaccattctcttagttctcgccttgtataaaactctatgaccacattctttacatctaactggttcctttggtgaaagtgtaaaattaactgcacattgagcacaaacatatttaacaccataatttttaatcgattgcataccactggcagcattacctagattagcagcagatggtggtacaaaaccttctcttgacattgtacttaaagtggtgtctgtatgtatatagtcttactagttatatctctctgaaacagggcaacaagagatatttatgatataaaatattattatggttaatattattgaatagtcccatcgaccgcgccgttctttaattttcaactttgttcaacatgttgaaatacttttcatggatttttcacatatttccagtgttaatgttgtagattggttggattagttggtttcttaatcattattactatcacttctatcttcaattagatctcttaattcaatcatgtatggcagatgctctttggcactgcgaataccgcatttattcatacgttcattacataaaagaagtcgatttcaaccaattgatccaattgatataaatcatttaaatcatataaatcatacaaaaattaatgaaaaatttaatgttttattaagtaatgactctaataataataatatagataataataataataaagatttggataataatttggaaatttcattattacaaaattcaattatttcaaaattaaattctttagaatattcttcaaatgatttttatgatattcatttattatatgaaaaggataaattattattagaattatctgaaattgataaacatatattatcattatcaaaggaaattgctccagattctacaaatatttcatcttcctcttctactacttcaaattatatctattctgatgatcttgaccttcaaaatttccaatctcttaaattcaaatatgatttaatcaataataaaaattcaataattgaattagaaactttaatagattttgttaatcgaatatctcaaaatcattatttaaattataatttaatgattaaaagattcttgaagaaaagacttgtatatgcaaaggatattcacccattattaagagataataaagaattaatttatatattaatgaattatttcctgaaaaattataaatattctcatctatcaattgctaaatatattgtttcaattaatggttcatgggatatttatatgattaatattttattgaaaaatactcttaattatacttataatttatctcaatctttattaattatagatcaaacattacaaaaatgtattaatgataatattcaattaaattcaactacactatttttgatttatgataaaattaatgatttaaaagatatcgactttaccatagcaactgatttaaataattatttacataaattatttatcaattcaaatttgaataataataaacattttactaatattgcatataaaaaattattttcaaattataagaaaattcaaaattcatgtactttaaatacccaattgaaaaattcactcattaatgattcttcaaattcaatatctttgattccattattatatgaaaataactcacaatttttaaatggaaatatttttcagataaaatcaattgagaagttatatttaaatacaaaatttaagaatatttatactttcaatagatttattgaaatgttgttatcatcaaatcaatggaaaaaagcatggagttcaataatacctgtatataatgtattagattcttattcagttgatgatttaacatcaatagttaagaacagatcaaatagagtccaattattgaaaattaatcctcgatttaatatttcaaattttggtcgattgtttcactatgataaacactttttatcttatcaaatcaaaaattatttatctgtaccattattaacttatcttataaatactaataattggcaattattaatacgttcaataaatgaaattagaaagataggaaattcaattaatgaaaataattcaaattcaaaatcaaattcaagttcaaattttaatggttatataattgaacaagtacttagaaatttatcaaaattagatttaaatgattcatatttagataaaacacactttttaattttatccaagtacatattaaatttgtacttatcaaatcaatattcatgtttaaaattttctaatgctttgataaatgaattacaacataaaattgacaaactttatgatactaaatattcatatagttcaaattttaacaataaaataaataaaagaattaattcggtgaggaccgaatatttatcaaccaataaatttaataaaacttcactgttgagttcatgtttccaaacatcatcatcatcaaattcacatatagaagataaaagtaatagcataaacgccaaggacatatcaaatgatgatttatattctcctaatattttggaatatactaaatttgaattaagtttgtatgaaaatttagatcagttatatttacttgatacacctgaaaaattgaaaaaagagaaggacaaatattataaacaatgggaagataaatgtataaaggataaagatatacttaaaaattatcatttaggatttatcaatagagattacagtagaaagaatattaaatgggttaataaaaccatgaatgatctaatgaaaggagatgagattaggatagaaaataatgaaataaaaaataatgtaaataaaaatggtaatgatgatgatgataaatttatagatgaaattaaaaataataaactaaacaagattgaatcacaaataaaggatgatatatcaaaattgttaaatacatcatcaaattttaaagtaatggagaaaaagtatacaaaatcttatcctgatgggaaatttgttattataaatccaattgaatcttcaattcataatattcaacctaatgattggatagattttgttatcaataaaactttaaatgataaaattactgagaatttatcaaattaacgaataaaatcttttttaatgaccctagaacaaaaaatataatatttatagattaaatacgtttttataagaaaaaattgtaaatagtaaaattagattaaattaaatgaaataatgattattataaacgtttccgtcttttcttgttttatataaaaaaataatgattataaaaatttgttacaataagataaaaaaataataataaagtgaataagtaagtaaatagaataaatttgttaatgcagaactatgccttcttttgactaccaatcttgttgtcttctggtttcttttggaaaatagtggtatccttttcatgtctgacctttggaattaatgatgatggatttaataatttagtaatataaccaaatggattcttaccaataactctgaaataataataaccacctaacataaatccaacatttgcaaaaatataaatccatgcaataccaaaatctctccaatgttgactccacttgataccatattgtgcaacaacttgaatttgttcagtatatggacaatacatacaattggaatcttgttctggatttctcaagtaaccaccgttgttagtaataaaatcattgaaatattcaccacatgtttgacctgaaggtggatcaacaatacttaattcactataagcacattcaagttttctaccttctaaaattggggcaacgaatgcttgaacgaaataagtgaatggagatgcaacatacatgaatgaccagaaatgtggggagtattgtttaggattcaaaataccacagaataacaacatggctgcaaataaattggagttgatcatagaagctgatggaacatctggtgaaaaatataagatagctaaaccgtaagtacaataatataatgggaaaattaagacattaatgaaaaagaagaaacctgccttatttgcatcacctgaatatcttggtggccagtagtaacaaacgtaaataaagaattgacagattgttgaccaatagatttctaaaattgtgtgacataataataaacatgaccagtggaaagtgttggataatgcttctctgacttcaaataattctctagtatcataagcaaaaacatgggattggttgatcatagcaacagaaattaataacaacatgaaaacggatgagaaggcattttgggcaccaccaatggtgtgatccataccgacataagataaaccaacgaataaagcacaagagacacattctaaaaacttagctctaatataaacaggagatctccaaaattgaacgtaagttcttcttagaacaaaccaaaattgtttgtcatatgatgtagcatactttgcactcaagtcacctgcattagtattaacaggtctttttggtaattcagcatgtaagtaatcaatatccttagtaatttgtgcacattctggtgaattgttccaaagttcagcccaatcttgtgcagcacttgcagttgcaccagcaccaatacaattcaaaatatactctgcaggattttcagatttaccacacttgacaccggagtgatgttcaaaataacttaacatggtggatgagttttcaccaatgtcaccaaaataaactgtcttaccacccttctttaataataataatctgtcgaaaacttcaaacaacgtagctgatggttgatggatggtacataaaatagcttgaccggaatctgcaagggctctcaaaaattgaacaatcgaccatgatgattcagaatccaaacctgaggttggttcatccaagaataataataatgatggcttagcaactaattccgtagcaatggataacttctttctttgttcaacattcaaacctctaccaatcttaccaaccatggcttcggcatatttgtccatacctaaacatccgataatcttttcaacatattcatatttttcagattgtggaacttcctttggttgtcttaaatctgctgcaaatctcaatgattctctaaccgaatactctgccatatgcaaatcttgttgttgaacataacctgttcttctcttgaatgatccatctaatggtctaccattaactaacatgtcaccagtaatggtaccaaatgaaattctttgtgctaaaacgtttaataatgtggtcttacctgcacctgattcacccattaatgctgtcatggtacctggtttaacataaccttgaatggaacataataattgtctggttgcaccgtcatatggaataatgtaatctaagtttttccaggagaaaatatctgcttcggagataatcttatctaaatcagcatttggaccatttaaggcaagcatcatttcttctctagtggcaactttaccatcccaatcttcaccacttgaagtatctggtaaacatcctctcttaaataaaagcatgtcaccaccaccttcaacatttttaatgaattcagacatcaaaacatttaagccaatataaccagcggtccaacaaatgttgacaccccaatatttccaaacattatgccatctaatatcaaaagcgtgatataaataatcatcaccaagaacccaatcttgaccagcgatagaacctgaaacactacaaatttgatttgctaaggaagcattttcataacctggacctgatggaattaattcatggcatgccatatgtctaccatggaattcattacccattaatgagtagaaacaataaaacatagggttcaagtaatgaatccatttaatccaatgatgcattttatttaacggcaaaacaaaacctgcataaacacacatcattaaaacccataaaccaccaactgcatgggcagtggtaccatctttggtgacagttgcaacacacttaaaagtaaaagacatacattgttgaatagttaataggaaaagcaagtacatgaaaaacgcaccagcttcgtgtttcaaatttggcatccaataagtagttaaacaaagaataacgacagcaattaattttgttgggaattcggtaataatttcttgtaatgcttcagcagacaaatggtacatcgaataagacttatgtttagttaaaatatttctagtggaaaacgagttagcaatttcagccaatgatgtaagagaacagaaaagcaaaacatagaataaaataccaccacgagaatatgcaccattagttgatttaggaatatgataatacatggaaccaacaacaaaacctttagtgacaaatgaggaaacataaacaatggtatatgtaatattaccctttgttctttggaaacctcttagcatcaagtaatataattgtgaccaataagtaaccataaattgagagctttgtctattacctttttgttttctttggtgattgacaaattcaagtctttgtcttgtttcttccccattacggttggcattgaattcatccaattgagtcatcaattcggcatattctggtgaactaacccaatattcagcaaattcgtcagatgtctctggaaccttaccttcaaaacctggctggacttgtctggatgatggtgatgtaacagcagttaaaaattctggggctgtcattctggatggcttcatgtaacccattctttcaaaatattcaatacccttgtctgcaggaccccagtaaatttgtttacccttgtaaagaacacaaaccttatcaaataattcataaatgttttgaccagcttggtaaatagcaacaaatgcggaacaacccatcatgttggtggcagttcttaaacattgagtaaactctaatgcagtggatgcatctaaacctctggtagcattatcgaaacaataaactgatgcacttaatgataatgcttcaacaatagaaactctctttctttcaccaccggaaacacctctaacgaaatcgttaccaacacgagtagcataagtatgtgttaaaccaaaaacggtacaccataactataatattaaaaagggggttgtaatgttagtatttcaattcttgttgaaaataatcaaatctggtaaactttggtttggattaataaaaaaaatatacttactctcaacatgttatcaacatattcttctctggacatattatcaactctcttttcaggagtcttacatcttaatgctaattgaattgtttccttaacagtgatatatgggaagtgaaaatctaattctgggttgtaaacaacataacccttgaaatgtttcatcatatgttcttgatctaaaccatcataggaaaaaacaccttcaactttagtgaaattttcaatttcacctgcaacagcttttaataatgatgaacaacctgcacccggtttacctaaacataaaaccatctcaccaggttctaagacaccaacaaagttttcaatgatctttctttgtgcacgtgtatctttttgaaacttcttccaaaattgaatgtattcaagagacatttcagtaacagatggaccatgagcagctgaagcatcaataccccaacatgtaacatcgtggaatgcaacaccagcattagctgattcaataccttgttcagcagatctatcacgtaaatattttaataataattctaaatcaaaattttccttgttaatttcaaagctatccatatctttcttagttttagtggataagactcttgcaagagatgcgacacgatccataccttcttgagttgataaaatacgtgtaacatgtttggataagtttgcagcagtaccttgttcttcagcatcatttaaggggtcaaatttttgaactcctggagaatctgaatcgatactctcagtatcactacttgtgttaccactagttcctttttccatttttaagtaagaatgtttataaaggtatcactaatctgttttttaatttgattataaacttcaataaactgggggtggataaaatagttgaatggtatcactgaaatttaagcaaaaactatattaaatttaatctagtaatagctggagaaagagtaatattaaaaaaaaacaagtgagtcaagtagacaagaaaatatgttgaaacaaatttctgctaagggtactatcatatatttaaaccatctcagttgattttgaattattctgttgttgaaagtgaaagtaaaagtaaataataaaataggcaatattatcataaaatgaaaggcataataacaataatatcagaaccacgcggaacttaaaccatcattatctgcaaaaggaaagcccaaattggaaataagataaacaacataaactccttggtagtaaattaatgatgacataggcattgggtacattctgagattgaatcatgagaatatgaactcttagccaggccagaccttttagtgagctttcttcattgtaataccgcgctgaataacgtaactaatgggaatgatgttaattatcaacaactagtattgcccttcactaaatagactactatatagcagatagttatctctcggataattccggcactgagttttgtcaactagctcaggtaatgataatatgatgtgaaaaagaacttaaaatttttattcaggatccaagttgttaaaaacgtaaaccgaagagatcacttggaaactaagcacaaaatgcagtgaaacttgtctgctctggtatatcttatcgtgtattaattgttgttatcaaagtcatatagtttaagttgaacgatgaggcggcttagcattttgttaaatcactatcaaaaaaattgacatgaaaagttcccgcgtcataacatgaatatttgcactggtattacatcatcacttaatcaataataatatagttgtgtatggcacacaacaaggtttaaggtgtgtgtatggcatatacaatgtttccggtagtgagtttgcaaagtatttatcatcaattttcaatgtatttttttaaaatctgaaaagcttgtagttagtatcttcatatttaagggataaatgtatattttaaaatcacttcgatccatatatctataccagataattagatcaaacattcaaatctaccagatgtatattcataagttttcgtaaattatctcacactatagtaacagaataataacctatatattttgtatcgtgggctctgaacggctgaatacatgaaagataaaagattgtaaacagtgtggacatttttcatggcaggttgtaaattcagtaacaattcaatggtaaataatcacgcgtcactagtggtcttgataaatttcaaagtttaattgatcttgcatatttccagtctaaggatctataagccattcagtcgttgattaaaaaataactcagtttttcaacttatttgaaggaatctaatatctgaaagtgttacaaagtttgttttgataactagactacagccaatttattatataaattgccatctcccctattttttgatccaagaaattttcttttcttttcatgttataattggttttctgtatttttaactcatcgaatttgttaaattccatttgactagataaattatactatctcaaaaattcatgttgtcaatcttgattgcatattatatgtgagacacactatcattaccgaaatcaaagagttctgtagatgagatacacttagaaaacctcatgaaggctccctttaataagcggtcgttcataattttaaaataatttatcaacttcgctaaaagttactctgcaaaatgagtaaaactgttgttcgtagtaacattagtgaatctaaaactgttacaggttgaaattttaaaataataataagaacttggctgttaaatttaattaatgaactataaatggttatataaaaaaaatcaaataaaaaaatcgatgaatatagtatttggaaaataaataatttgaaggataatgcttattcgataatccttagtttgaacaaaaaatttgtaaattgtaaaaataaattgtaatcttcaggaagaacatctcgatcatgccttcttggtggaacctatcttattgtcttctggtttcttttggaaaatagtgttatctttttcatgtctgacctttggaattaatgatgatggatttaataatttagtaataaaactgaatgggcttttcctagcaactctaaaataataataaccacctaacataaatccaacatttgcaaaaatataaatccatgcaataccaaaatctctccaatgttgactccacttgataccatattgtgcaacaacttgaatttgttcagtatatggacaatacatacaattggaatcttgttctggatttcttaagtaaccaccgttattagtaataaaatcattgaaatattcaccacatgtttgacctgaaggtggatcaacaatacttaattcactataagcacattcaagttttctaccttctaaaattggggcaacgaatgcttgaacgaaataagtgaatggagatgcaacatacatgaatgaccagaaatgtggggagtatcttttaggatttaaaataccacagaataacaacatagctgcgaataagtttgagttgatcatagaagctgatgggatatctggtgaaaaatataagatagctaaaccgtaggtgatatagtataatgggaaaattaagacattaatgaaaaagaagaaacctgccttatttgcatcacctgaatatcttggtggccagtagtaacaaataaaaattaagaattgacaaacggtagaccataaaatttcaacaatagtgtgacataataataaacatgaccagtggaaagtgttggactaatgcttctctgacttcaaataattctctagtatcataagcaaaaacatgggattggttgatcatagcaacagaaattaataacaacatgaaaacggatgagaatgcattttgagcaccaccaatggtgtgatccataccgacataagataaaccaacgaataaagcacaagagacacattctaaaaacttagctctaatataaataggagatctccaaaattgaacgtaagttctttttaaaacaaaccaaaattggtttctgtaggagttagcatatttggcacttaagtcacctgcattggcattaacaggtctttttggtaattcagcatgtaagtaatcaatatccttagtaatttgtgcacattctggtgaattgttccaaagctcagcccaatcttgtgtagcatttgcagttgcaccagcaccaatacaattcaaaatatattctgcaggattttcagatttaccacacttgacaccggagtgatgttcaaaataacttaacatggtggatgagttttcaccaatgtcaccaaaataaactgtcttaccacccttctttaataataataatctgtcgaaaacttcaaacaactgtagctgatggttgatggatggtacataaaatagcttgaccggaatctgcaagggctctcaaaaattgaacaatcgaccatgatgattcagaatccaaacctgaggttggttcatccaagaataataataatgatggcttagcaactaattccgtagcaatggataacttctttctttgttcaacattcaaacctctaccaatcttaccaaccatggcttcggcatatttgtccatacctaaacatccgataatcttttcaacatattcatatttttcagattgtggaacttcctttggttgtcttaaatctgctgcaaatctcaatgattctctaaccgaatattctgccatatgtaaatcttgttgttgaacataacctgttcttctcttgaatgatccatctaatggtctaccattgactaacatgtcaccagtaatggtaccaaatgaaattctttgtgctaaaacgtttaataatgtggtcttacctgcaccctgattcacccattaatgctgtcatggtacctggtttaacataaccttgaatggagcataataattgtctggttgcaccgtcatatggaataatgtaatctaagtttttccaggagaaaatatctgcttcggagataatcttatccaaatcagcatttggaccatttaaggcaagcatcatttcttctctagtggcaactttaccatcccaatcttcaccgcctgaagcatctggtaaacatcctctcttaaataaaagcatatcaccaccaccttcaacattcttaatgaattcagacataaaaacattcaaaccaatataaccagcagtccaacaaatgttgataccccagtatttccaaacattgtgccatctaatatcaaaagcttggtataaataatcatcaccgagaacccaatcttgaccagcgatagaacctggaacactacaaatttgatttgctaaggaagcattttcataacccggacctgatggaataaaaacatcacattgcatgtgtctaccatggaattcattacccattcaatgagtaaagacaataaaacatagggttcaagtaatgaatccatttaatccaatgatgcattttatttaacggcaaaacaaaacctgcataaacacacatcatcaaaatccataaaccaccaagtgcatgggcagtggtaccatctttggtaacagttgcaacacacttgaaagtaaaagacatacattgttgaatagttaataagaacaacaaaaacataaagaaagcaccggcttcatgctttaagttaggcatccagtaggttgtgaaacctaaaatcataacagcaacaaatttagttggaaactcggtaataatttcttgtaatgcttcagcagacaaatggtacatcgaataagacttatgtttagttaaaatatttctagttgaaaacgagttagcaatttcagctaaggatgtgaccgaacaaaaaagcaaaacatagaacaaaataccaccacgagaataagcaccattagttgatttaggaatatgatagtacatggaaccaacaacgaaacctttaacaacgaaagacaaagaataaacaatggtatatgtaatattaccctttgttctttggaaacctcttagcatcaagtaatataattgtgaccaataagtaaccataaattgagagctttgtctattacctttttgttttctttggtgattgacaaattcaagtctttgtcttgtttcttccccattacggttggcattgaattcatccaattgagtcatcaattcggcatattctggtgaactaacccaagtattcatgcaaattcgtcagatgtctctgggaccttaccttcaaaacctggctggacttgtctggatgatggtgatgtaacagcagttaaaaattctggggctgtcattctggatggcttcatgtaacccattctttcaaaatattcaatacccttgtctgcaggaccccagtaaatttgtttacccttgtaaagaacacaaaccttatcaaataattcataaatgttttgaccagcttggtaaatagcaacaaatgcggaacaacccatcatgttggtggcagttcttaaacattgagtaaactctaatgcagtggatgcatctaaacctctggtagcattatcgaaacaataaactgatgcacttaatgataatgcttcaacaatagaaactctctttctttcaccaccggaaacacctctaacgaaatcgttaccaacacgagtagcataagtatgtgttaaaccaaaaacggtacaccataactataataataaaaagggggttgtaatgttagtatttcaattcttgatgaaaattaactttggattaataaaaaaaatatacttactcttaacatgttatcaacatattcttctctggacatattatcaactctcttttcaggagtcttacatcttaatgctaattgaatggtttccttaacagtgatatatgggaaatggaaatctaattctgggttgtaaacaacataacccttgaaatgtttcatcatatgttcttgatctaaaccatcataggaaaaaacaccttcaactttagtgaaattttcaatttcacctgcaacagcttttaataatgatgaacaacctgcacccggtttacctaaacataaaaccatctcaccaggttctaagacaccaacaaagttttcaatgatctttctttggggactattattttttttaaattttttccagaattgaagtaaatcaagacataattcagtgacagatgggccagtagcagctgaagcatcaataccccaacatgtaacatcgtggaatgcaacaccagcattagctggttcaataccttgttcagcagatctatcacgtaaatattttaataataattctaaatcaaaattttccttgttaatttcaaagctatccatatctttcttagttttagtagataggactcttgcaagagatgctacacgatccataccttcttgagttgataaaatacgtgtaacttgctttgataaatttgcagcattttcttgttcttcaggatcatctaaaggattaaatttatgaacatcagcagaagagtcaatactgtctgtatcatgactattattctcatgaacttgtttctccattctttaacaattaataaagggaaaatcaataatcaaaataaaataaagttttttttaaaatgtagttttttttggtagattataagttattaatttttttgttgataaaatttattgatagcaaatctaacttgaataaaaattcttcactaaatagaaggatattatatgtgtttgaataactaaagttaaactgtgataaatgaaactttttaaataataaattaggataaagaataaattcaaatagagggacaattgaaataagaaagacactgataaaaatacaaggataaaggaagatatttataaaataaaaagagtttggaataaaaatcggtgaaatggtgaaaaaatacttgtataaccgacattcatgccaatgtaatcaaaaatttaagtaataacaataacaataataataataataatagcttattatgggagaaaaaattgataataaaaggctagagtaatttacaagtcgtttccatataaagtaacagccttttaatgcaaaaaaaaattttttaaccaccaaggctgtagtttccccacggagatatttataatatgctgtggctatgccatattttacaagtctctatgttctgtcaaagaataaatacgttttatataaacctatgtttaccggagcctttgtataagtttttagtgggggggtgttagagttaattattgtaagagtgattaatatctgtataattatcgatggtgtagaaatgaagattaaaaaatactcaccccataaaaataggctgtggtaactacgtcaaacaatgcgataaggaaagtcggttaaaattaggtaaaactctttgccgatatctttcaatcaacatggtcggttgaagtggcggctattcattagccgatggtatattgtgagacactaaaattccgagaagttaagtgaaaatcgcgaacaaagaaaaaaatgttacgtaatcaattttcacccacggaatttagcttcacattggaaaagtggattatttcaaattaatttttcatcgtgttgaaaatcaaatcaaaataaaaacgcgtcaactttcagtcttgcaaaatgatatcaataagtgacgcgtaattttaatatctttcaggttaaacacctgactgtgtatataaaccatctatatttcttgctcttgcaacttctttccccatcttacagaatggtatactctgagtattatctataatatatttttaaattatacaactatcaattcgaatatagaatgtcctgttgttcccgagaaccttcatcctaaaatagtatctcggtttcccctttgggaagtgttattgattctaaaatttcattcgggtaaatttctcttgattgtttagtagtggtgttattttatcatctttgataggccaccttttatatcattggtcttatatatcacaataccttatattttatggggttgaaacgttattattctcgggtttcagtataatttacctttacgtatattctactattacgaatcctattaataaacgtaaatttactacattttacactaggtaagccttaattttataccccctatcaacgtatatcttctccacatcttactactacattaatttaatatctattaacctatatactaagttgtatttaatatgtagcattaagcaaccattttttttttcactttatgaaaccaattttagctgctctttctctcacctcgaaattcatcgcctcttttttctcctctcaattctagggcttattctccattttcgaaagttttaattgcttctttaactttaatttccttaattttctttattaacttcgattggaatagcataggtgtatccactctcatatttggtgggttttatttgggatagtcacatataaaagaatcaaaataattaaaaagaagtttatcagctactccttacatcaattgtttataatttttcttataaatttgatacttattactttacatttaaactactatctattttaatttacaacttactgttcattcgttcattattttagtttaatttcaaactaattttttatcaagagtttaaaaatagaagtttcaaaatttcgaaaaaaaaattaattttaaattttaaatcaaagaacacacactccagaggtaaaaagtgaaaagacatttctgactggtcactttttatattatttttttttaagtcctatagtttgtattcattcatttggattatttaactgatcatttcaattgttatcacctttaaccatatcatctaaagaagctaacatcttttaataaaaaaaaaactaccctttcacccttacattcgactaccttttcctacaccaactctcttcagcctcaacccaaactattggaattttttttttcatttactggttcatttcagaaaacgatgatgtcttcatctcctccacataatagtaactcaggctataatccatatataccaaataatgattatcaaattacttcatcgccttcatttaatgaaaatttaaatttacaattacaaaatgctgattatgataacaattatcaatatgatgaacaattgaataattatacaactaataataatgataatgatagccgactcaatccaagtatatctgataactcaatcaacttagattataaaggaaaaccaatgtcacaaagaagttcagtttctcacattgaaggtcaagttcaaggtcaaacacaaaatcaaggtcaattttcaaatatggaaaatgttgatagtgaaactgttcctaactctacaagaaattcaagtatacatcaaataaatcccaatgatgatcaattgagtttgatgaatagttcaaataatcattatcaatataattctaattttatgtcaatgactcctcaatataattcaatgcaagaatctattaatgatccttcatacaacgattttgttccggcatctattcaatcaaattcggataacaatttgaactttactgtatcgtcgccacatatcaatccttcgatgactaattcaactactagttcttctttcaattctttatattattcccatcaagcattgtcaaataattcaatttcaagcggccttcaacagcaacaacaacaacaaaaaaatgataccccgttacaaccgtcgagaagattatctgtatcaattatgcataatggattaaccacaaccccttccaccactcctctaaggaaacaaaataatttaactcctagattagcacctaattatggacaagtttattcacatagaagatctaaatcaaaattatcaactgataaatcaccaaatactggtaatccattttacaatcctccttcatttttatctccaaaagttcaaaagaaatctcatagaaaaaatatttcaataactaattcaatttcttcaacacatttggatactgatttaaatttacaaaacttacataatttaaattacgttggttctcctcgtgaaactcctttaaggacgccaggtaagggtttgataaacaactcttattatggtgatctcgatcctgatgatatggatagtacaattcataataatttagatattgataatattgatgatagaatagatatcacattagatcaaactcttcatgagaaggcagatgaatctgatagttataatgatttatttggttctcatttaagctcaaatttagacaacactttcattgttcctaatattattgaaaaggaaaagtttaacaatcgattggttcaaacttcaaatgatctgaatagagtgcttaaagcagatggtagtaatgataaaaatgttttaaaaaatgtgagtctaaacgctagagctaatagaaatattgaagataaagttgaaaaagttgataatatgaataaaactaacagacatacaactgattcaattttagattctgtagctagtggttactcaaatatggattatattgatgagttgtttccttctgatcaatcgactgtggggtcgttacagccaaatttattatttaatcaaaatcaatcacaaattaacgatagaaatgcaattcataatcaatctcaatcaaatcaacaaaatttagttaataatgatatttttgttgatgatacccaatcaaatttcaatcattctagaaattcttatcaatataaaccaagttcgtcaaatagctcacctgaattacttcaaagctcattacaatatcaattacaatatcagtttaatgaaaagtctatgacaagtttgccatcaccgaatgtagttccaccaacaagatatatgaacacttcatcagtaccacaaactaggcatggatctactattattgattcaaaattacaaagatctagatcatcttttaatttgagtgaaattgcagcatctaaagaatctaagaaatatagtactgattatttagaatcatatgatgaaaattcagagatcgatagtaaccttagctcaaatgtgattcctaaatctgcttcattacaagaagttgcagaaaaagcatcatccaaagctagaaaacataatgaatcaaattcatcaaatgataataatataaatgatgaaacaactcacaaaacaatcactagatcacgttctaagtctaaacgtagttcactcaatttagccaatatcaaacatccagagaaattagatttaccacaacaatctgctagatccaaatctagaactaaaaagacaaatcatgatgataaaaaaatacatgagtgtccattatgtcatatgagatttcaaagaccggaacatgttaaaagacatatgttatcacattcttctgagaaaccatttgcttgtcctgaagaaggttgtggtaaaagatttaatagaaatgacaatctgaaacaacatctaagaaatattcataagaaaaagatttgaaatttgtcatttatacaaaacattttgcattaattaatacctttaatctatttagttcttacaatctattttattacatattgtatgtttattattataaaaacaatttattagcattgacaatcccgttaaaaaataatctgagaaaaataatcatgtatatacgtaaatttgttttaaaaaatcagagtaaactaatgtagatagataacttaaaataatataaaataaagaagagttttagtgaattgcaacttaatagaacatcatccgaaaaattcactataaaacgtttcttatttgagcttcagctggtgtttcactgacatgaactgttgcgacaacattactttgatggaattcttgacctaatattgcagcacctgcataacaaaaaacattaattgtatataaaatagccaatgcaagtaatgaagtagccatgcaagttaaacttaaccattgaataactgcattaattgcataaaataaagctctcatccaattagtatctaattgttggataaatgatataagtgaatctggaattctaaaaatcttcaagagaaatggaatctcaactaatgctaatataggactttgaacaattgcaataataccgaatatgaaaacaacattaatatgaaataaatttgcaatacctaaagctaatgataaaaatatacatgtaataccaatccattgaccataaagacttaaatttctggatttcatgtcttgtaaaaagccggatattttaaaataatctgtaattgccattgattttgttgattattgtatgtttagagagtaaatctgataagaacaaggtggcttgttctgcataattcaatttgtgaaaagggttattaaattttaatctgtaagcacaataaaaaattatcattcaattttcatgattaggtaatcttttttgttccacatgttggttttattgacaggctactggatcagatcatcgttatatgttgggctacttcttattctgaatatttgaatacatcaaagacacattttcacattttatgcagttatgagtgaaacatcagctttggatgaagatgtttttgtacgggatactttgattgatgtgaataaggttgataataaggtgaatatttcaaataatggctcgaacattgttagatcaaaatctaagaaagcagaagagcataatggtaatttggatgatgatgattccgataatgatgatgatgatgatgatgaaataacaaaatctttagaaagaattggtgttactattccctctttcatgatgccaagaatagacttgccaagcccaacatcagtttctaaaagaatcaatgattacttggttcatagtgtgagcatggaaaattcatcaagtagtaacattaaagagctattaactgaactgtttaataaaaggacatcagatttgaaaaatctttatactgaggtcagtgattccttaactggaattgttaatactaatattgatcatccaattgatgaatatattgatgaacttcaaattgatgatgataatagtgaaagacatacagaagaagacattattaacaaaaagaagagtgtagaatctaaaaaatacaaagaattagaaaaatatgaacacttaacatacttgacatttgaccaatttcaagaccaaaagtttttgaggcatcgtataaagcaaatattaagccttgaaatagatcctgttttacagagattgttgattcaaaaattaatgtcaagatcatatatagagaaacaaaatcatattaagcaacaattaaaagcgaatgctgagaataagactgctcagaatataaatggtcaaaatgaatatgatagtgctggtgatagtgatgatgaaagtgatgatgatatggaggatgatgaagtttttcttacagcaaaagatagaactgctacatactactccctggaagaagatattctcggttgccaacattatcaaagaaattgtaaagttgaatgttcaatttgtcacaaatggtacgcatgtaggttttgtcatgatgaagtacaaacacatcatttgaaaagagaaaaaataaagttcatattatgtatgttttgttttgaacctcaacatcctcaacaatactgtgtgcattgtaataaagaattgagtaagtactattgtgacaagtgcatactctatgacaatgatccaatgaagaatatctaccattgtgataaatgtggaatttgtagacttggaatggggttgaatcaagactactttcattgtgattcatgtaatgcatgtatatctattgacttgcaaaaaaatcatgtctgtattgaaaattcaacaaaatcaaacttgtccaatatgtgatgaatttatgtttaattcaaatgaaaaagttgttttcatgacatgtgggcacccgattcatgataaatgttataagcaacataccttacattcttataaatgtccaacttgctctaaaactattactaatatggaactacaatttcgaatgagagatgcagaaataaagcaaagtaaaatgccagaagaaattaaaaactgggaaacggagattaagtgtaacgattgtggaggtatgagtagagtcccgtttcattaccttggtcataaatgtgatttttgtcatagttataacacaatgcaagtgaaattgattaaagataacaatgtcgaggtgatacctgatgataacgttggtaccaacagtaaaaacaatcccaagctccatagatcggatactgatcaactttacgttgccgaaaaatttgtcactaactcattaaatcaaaactttgaatttgatcaagaaaggaaaactgatagaacaagtattaaaggaaatggtatcatttgatgaaattgatcaatcaattgatcacaattactgtagataattttattaaagttataaataattttgaagcttactcctcaattggcgatgcctttaaagactggataagtatttctcttataaataatgttagtgatgatgatgataatgaaattaatggtatggataatggtaatgacaaaaatagacgtaatgaaaactaattttaattgaattttatatagcttttgtacttagagattaatgatattacaataatattgatttaaagacttaatcaatcaagagtattacgtaatttagtatgactaaaaagcttgttgtgatatatattcttatgaccttttatgcaagctgctatgcgaaagtaagagcaggttgcccattagtataattgaacaatctaattcaccaataaacataaatgtttgtgtagagctgggttaaaaaagaactaaaactatggaataaaaggccaaaaaaactaaagctgagccgcctaaaaagaagaaaacgtacattttatgaaatatcaatatgagtttataaaacttataattttttattcataaagtaattatcaattaacctaaaagctgatatttcagaaagcaataaaataggctattattatcttgaatattttaagtactataaataaaatataaaggtaaaactatacaactaattgtaatttaggtattatgacgtactctggaactcaaaataggtatacttaagagcttacttatttttgaagagtcagaggagttaataggggtgtttggatttgacattgaattatggtgaatactatgattatccattaatggagtctttggtccactataaaacatactcgtaggagaatctattagattttcttgagatgaattgttaattatatttcctagcttagtatcaagtttcaaacgatcaacgttcttgagtttaagatcttgtagtttcgatgatgcttcttcagcctgtgaagacagtgaatatattgtattagatctactattaagttgcagttgtcgtggtgttggacaacccgacttgatgaattgtaaatctgaagcttgttggattatttggggatctggtttaacaggtgatatatctgatagttgggaattggatctaaaagttcggctagatagtgatgatcgcttagagtttggcgagtcattagcaatagaatgacttccaatagttccttttctaggtgacacaatttgagtagttgcagatggatttgtaactggctgtatatatcttctgttattaatggagaagctaaaatcctgctgctgcggagttgcaacttgctgtgatggaaatgcttgcggttgctgttgtgatatttgaggtactgttgttggagtttgtgatgcattagatgttttacgtaaagataatttataaccattcgatgatggtgaagaagctcttgaattccgagatgatgccgcagagagtgaacgtgaaattggtaaaaaaagatcatcaccttgatcaccaaaaccattattggtgtattcatactcatccgagatcattgaagaaagcgaatattttcttgattgaattgaaggtaacttaattcttggttgatggtctgaagtgggaaatgtagcattaacaggcgataagaacgagatgttgcttacattattcttgtttgccttgcttgatgcatactttgttatgggtatttcaatttgggtattttccaatgaagctaatgttgaaggatgtgattttaatgaattatacttttgaattatgttattatcaaatgcaacatcagcaggtttccaaccagcattattgaaaagttgatcatcagcgttatatttgatcaaaaattcaatacattttaaattgttaaactgaaaagctttatgtaacggtgtatcaccttcattatcttgtaaatttggatatgctttgttttctaacaaaattgccaaacaatcagagttacccttaatacaacaaatatgagaaggagtcaaaccatttatatcacgttgatcttgacaaacgttaaagtaagataataataatagtaaagtagcagcagagtcaccagcacatgcaatatgtataactgtttcttttttaaatgttaatttaatttcatcttcgtcagtaatttgggtatataatgaatcatctggattttttgtgacttgtgatgaaaagtttcgtagagtgcaattattgatagaactaataaatctatcatgaattaatcccaataacaattccgcaatttgaaagtggttatggaatgaagcataatgaagatttgaccaaccattggacgaatccacgttatccaacagatccgggtatttttttaacaaccttgaaacaacgaaatagttgtcatcaatgatggctgtacgtaaacgattgctgggtgccgacatctatgtctgctttattattctgtgttaaatatatatatatatatatttaacgcctttagtattgcgcttaggatcttttggaaggaagaagctttggtgtgtgtactccagttttctatgttctacagctaaataatatttttcctctttccacaatacaatgtgcaccaaaattcgccaatttcaaactttttttctatggaaggaaagattttcccgaattgtgccattattttaaagtcatgtcatcacattattacaggattctttcatgtgattgttattttaaactatactttgatattgtcgaatatataagatatacacaaaataataataaactgctatctaagataaatataagaaggacggaatagatctttattctttatgtgtttttcactgtctctaaaatcattttagagatggcaagacatttttcttcttcggttttacgacatatcacttgtaaacaaacaggcattttatcaaaatcttgaggaatatactgcttgcggatagctgcttcaagctcagatcttaccggcctttcctctaaaacatcaattgtcgcatcaacagtgcctaaaggcaaaacaacaccaacagaatcacataaattacaaaccccagtgtattctaaacaaacagcactatgtggttttgtcgatggactagtcatgacaggggctaaaactgcatctagttgattatcatcccaaaacttcaaatatttttgtttgatcaaataaacttcctggcataagtcccaccattcattaattgtaagtggagcttttaaattatcggaatcaactaaataaccaagtagttcatgaattggttcacccgattttgcacattcatcaataatttctttacctgcatcagcaccaaatactgccattaatgcattgattaatcttttatgctccggccattcaacttctacaacttctaatttagcgtcaccctttaaaagttttgatacctgattcaaaactcttttgataggtggtaatggctcaacattaccactgtctctccaaacaccaatctttattgtatctttatcaaacttaacattttccttccattcgattggtaaaaccttagggtcatgtaaccaacacttagtttcaacaacagctttcatgatgaattcaatttcttctaatgtttttcctaagggaccaataactgatggaatagattcttgtgcttcatatgaattactaactcttaaataagatactctgccaatactcggtttcattgcaaagagtccattataagttgctggaattctgatactgccaccaatatcagtaccaaaaccaatacgtgcaccacctgctgcaattaatgacccctcacctccggatgatccaccagaggataaattaatgtttgctgcactataagtgtagggatataagttagattcagtttctggtgccatcattgccattggaacacatgttttaacaaataagatggcgcccaattcaattaatttgtctgctagtaatgcattttctttcatcttaacattagccaaggaaacataaccaatggaagatggaattcctttaagatcaacttgatcttttaaagatactggaattccatgtaaaatcccaacagtttttccgttcttttgaaactccaaatcaagttctttggctttcattaatgcctctttgacgaaaatttcagagcagcagtttaaaatttgatgtgctaacattgctctatggcagaatgcataagtaacatcataagcactcaattgacctttaccaattaacaaatatagttccataattgttttgcctgtaattgcaatctcattttttggtaagattgtgtctaggtaatcacttgtattgagaaatcctttcttaatcatatcatctttgagattagcatctaaccacttgtgagggaatactttcttttaaagcatttcttttttgctcaacaatgtctttccaactttctgccattttctgtttgataaatataaaaaagttctatatagaaaaggggagtgattacagtcataaaacgtctaatggttacagtataaaatatataaaaagtcatataaaaatcatataaaaatcatataaaaaatcaatcttatctacttcggctattttcgataagaagttgcgcacgagagcttaagctcaagatgatgatacaatcaaagatagagccatggatttaactttccctaatccagagtaatagataacagaaatcagtaattttgtgaagatatcttgtttatcagttgtgaaataccccttatcggagagataagaaccgataacgtcactaaaaaattaccagaaaagggtttactctcgcccaaaatattttgacacattttaaagtttcaaattatcgctgaaattggaatgtctgccgacattgataagaatgaaatgctctgataatttttcacctctcgtatactatatatttattgataagatatatttaaagcaccaacgggaattgttttttgcaaaagaaaagaattgaaaaacttttttaaatatttttataagcatacaaaaaaaatgccagactttcacccaattctaactcaaggttatggttatggatatgctcttggaattggtgccgcatttgcattattaatggcatgtttaactaaaattctatcagtgtatatgggacaagttcaaaattccgaaagattttcaacagcatcaagaaatgttagctcagggttaattgcatcatctacagtttctgcattggacatggccagcaacattactaacatctggtgcatggagttatacatatggtatttcaggtggatttttatatggtgtcggtggtacagtccaaattacattatttttattcttagctttacaaataaaattaaaggcaccaagtgcacatacagtttctgaatgtttttcaattagatttggtaaaactggtcattgggtttatttatgctattgtatatgtacaaatgttttgatttcctcattattgttgttaggtggatcacaaggatttgcagctaactacaggaatgcatgttgttgcagcgagcttccttttaccattaggtgtcatggcatatacagcattaggtggattaaaggcaaccttcatttctgattggattcatacagttataatctatatgattttgattataacgatgtatacaatctattgttcatcatcattgattggatcaccatctaaaatgtataatttattacaggaagttcaagaagtttttccatgtgtttcaggcccaagttatttatcattccataattctgagatgttgtttttaacatggtcagttatgttaggtggtatgagttcagtttttggtgatccaggttattcccagagagcaattgcatctgatgctaaaagtgttttttgggggtatttgatgggtggtatttgttggtggattattccaatgggattaggatcaagtgcaggattagcttgtagagcattattaaccaatccaagttttgttacatatccaaatgaattaagttctgaagaagttggcttcaggtatgccagttatttatggtatgtttatgatttttggtaaaagtggtgcagcagcgggattattgatgttgtttatgtcagttacatcagcatcatcagcagaattaattgcatttgcatcagtttcaacatatgatatttttagaatttatattcaaaccaactgcaagcggtaaagaattggttagagtttcacacttatcagttttcggatttagtttattaatggcagttttatcaattgttttcaattatattggagttacagtaggatggctattaagttttattggtattatattatcaccagaagttggggcagttacattgatgttattttggccaaaaatgacctaaattatcattaataattggagcaccactaggtacattaacaggtattggatgttgggttggtagtacatatgtttatggaggtcatataattaataaagatacattaatgacatcaaaggcaacatttattggtaatgtaacagcaatttttagtgcaccaatttatatgataattataagttacttgaaacctgatgaaacaccatttgatttaagtttattaggtaaagatattacattagcatgatgattatgataaagaggaagaaattgcaattcatattaccaaagaagatgaaaaaatattgaaaagacaaagattatattcaattttatttaattttttcatacttttactagtctatgttatgattgtctgtattttatatggggttaataaagacttcagtgaatcatcatttacaggatttattgttgtatgtttgatttgggttttattagcagcactttacatcatatttttaccattatatcaaggacgtcattcattaaaatatgtgattagtcatttaattagatttcaagttccagagaaagaatcatcatcatttaagacaggtgaaagtgctgagccgagcgttgaaaatatttccttaatagcgggagatgataaaaattctagttaattacgtaatacaaattgtataatataaatagtaataaaaattttaattcagcacgcttacgtaacccatatagataacacggaggaatggagtccgaataaaataatagttgataatttaagatttatcccgggaacgcgccgttttctgtgccggtagtaaccatttcgtggggaaattgagtttattttcttttccatacatgcaattttcgttactgataatctccgggatgtcaaattgaaaatttaactttctcgatttcttcatgggctctcccactgtatacaggccggataagtcttcctcccccccacaattactgattcaaggatcgggcagacggcggacgcgaaaatcatttgattggctcacagagtgggaaaattacttaatcagtaaagttttgcgagattttatcattgattgtataaatagagagtagggtcccatcatttaatgacttgaaaagttattatttttaattgtatttgcatatttgatttttcttaattaccttttctaaaagagtaagcaataacattacaatgtcttctgcatctcaaaaatcaaatcaaaagccaaagagtgccgttattgatttaattgctggtggtacagcaggtttatttgaagccttatgttgtcatccattagatacaattaaagtcagaatgcaattatataaaaaagcagctgattcaactgcaaaggcaccaggtttattcaaaactggttataatatttttgcacaagaaggtttctttgctttatataaaggtttaagtgctgtttgtattggtattgttccaaagatggcaattagattttcatcttatggattttatagatctttattcactgatgaaaagggtaatatttcaggtccgttaacttttgtatctggtgttatggctggtgttactgaagcatgtattgtcgttaatcctatggaagtcgttaaaattagaatgcaagcacaaaataattcattaaaagatccattagcaaagccaaaatatacaagtgctccacaagcagctgttttaattgttagagaagaaggtttaaaaactttatggagaggtgttgctttgactgctggtagacaagcaattaaccaaggtgctaattttacaacttattcatttttaaaatcaagattacaagatgctcaaaatagtgaagttttaccaacttatcaaactgctgttattggtttcatttctggtgcaattggtccattctgtaataatcctttagatactattaaaactagaatgcaaaaggaaactgcaattacaactgaatctaatttaagtagaggtttaagaattggtaaaaatttagttaaagaatctggtatttctgcattttataaaggtatcattccaagagttattagagttgcttcaggtcaatgtgtcgttttcccagtttatgaattctttaaaggtttcttatatgatgttgcaggttataatactgaaaagaaattaaaataagtcttgatgatatattataatagctcatctatttatcattaaagttattcttttctaattatttattcatttccaatttcattatataatatccaaaaaaactcaagtatagactattatttattaatatattcccttccaattagctttcatctgtccttttcatgattgtgtaaatgttttataaatctagaaataaaatcaaaaaaagtttgaaaaatattacgtacaggaatatagtaaattgtaaacttaagcgtataaagctacaacatgaaaattacaattacagtctacaaatctttctttacatgtaaaatcttatattcgaacatttcaagtgagatattatgatattaaatttaagagaatttagatgagttcaatagttcatagatactattactatccttttaatctcattttaataaacatatatcattaaacttgaaaacatttaatttttgatcttttttgttctttttattaatggaaatgatacataatattgatataactcgataaatgaaattttaaattatttaaattaataaattttaatttaatgcaactgttaatttaatcgaataaaccgaaacccatatcatcatcagattcttctttttcttcttcaacttcttcagctgctgcttcttcagaagcacctgcaccagaaccggaagctgctgcaccagatgctggagctgctgctgccatagagaataagatttcctttaaatctttaccttctaaagcttttgcgaaaactgaagtccagatggattcaactgatgcacctgctgcggttaaaacagtttgtaagttttcagaagtaatttccttttctgcatcagctaaaattaaagctgcgtatgaaacaagtgcgtcagacattatattgattcttgttaaatgaaaagttcaactagaaagttaatcaatattaatgatattgtagattatgatattatttcagtaataggtaatagtaaattttcgaacatattcatcctctatcgcgattcttgaaaaatttcattaaattattatgataaaaaagtagagtggtgcgaggggcttattccaaaattagtatctgtgacggctaaaagtactactaaaatttacattttattggattacttaataaatttaaaaaaacactttcacgtgacaacgcggctcgtcactcatatatcaatatttttatttttgatttaataccttactgataacaaagtatttaattgtatatcattgaaacaaagttttattgtaacgtaaattctgtatataatcggctatttaaatactaactacttattatcattattcagtaacatgatatattatatacaggagtaagtttaagcttaagtgataacctattattcgaatcaataattcacttgaatacaaacttaattagtgaattttttgaaattctctaaccagtcaagatattcattattttccttaacaccagaatatgctaaaatgaattcagctaaaccttgatcaacacctcttgaaactaaatattgattaacagcttcttgtaattcttctgcaagattagagaattctggacctgaatatttaagatctctttgagctgcagcttctggtgaagtcacttaatgcaatttgtgcatcttcaaaattagtaattgcagtgactgaaaaggatgaatcaattaatgataatgaaacatcaaagccagttgctttgttatctttagcaacaacaacattaacatcaacatgagctaattctgaaacttcatcttctaaatattcagattgttcaagttgttcttgcatttgctttaattgcattgaagtttgagaaattcttaaaacatcaaagtaaatatgaactttttcagtttcattaacagttttaactaattctgctaaaactttaccatcagtgttaataatttcaattttattttcttctaagtaagttttaaaagtttcatctaaaccaaatgcatcagcttcttcatattttaattcttgagcaagaacttcatttaattgtgtttttgcttggttgttaacatttaatgaagttgagaacttagcaacagaaactcttggaattattgttttagtaatttgagttttgaatagcagatgatctgattgtagttctaagagtttgtgcgagtaatcttgatgacattttgttatttacacttgtttaacgagttataaatgtaagttttaaatgtgatggcaaaaggagggattaacaggggaaataaattcctattattattattgaatacaaaattcctgtctcaatttattgattgatttttttgacatgcaaaattccgcggaaaattaaacaatcttattattactataactgtgttctagctagagatttccatatggtatagtacaataattcagaataatatgatcatgaataaaatttttatgctctatttatataaagactatatttatggaatggatatatgcataatgacattagaaaaatggtgctaaaataaagcaaaaagtggaaatgtagtaacgaatttttccactactaaaaacaataataagaattagttttaaaatgaaattggaatagtatattatcttttctcatctaatttaaacaactttttgagattttcatacattagataactgattgaaactgcgggtattactttagctaaatttggtaccaatcctttgaataaaccttgaataccttctctttgaacagtttgtttgaaaacatcggtaaaacctgtataagtatatggatgtgcataagtaccttgagcttgtaatctagttcttaataaattaattggataaaccattgttgcaccaaatgtacctgatgatgctccaattgataaaacaatataatttggtaattgaacatcatcaactgaacaatttaattgtgcagcttgtgttttaatataccattttttaacagttgtaaaagtacctaaatctaatgcagcatatggaaacataccacttaaaccaactattaaacctctatagaatactcgaattccaccttccttatataaatctgaagctgttctaaacagtaattttgtacctttaatttcagaatctaatgaagcacattgtaatctatatttaagtgtatcaattggataaacagttgtttgtgctaaaacaccaccaataccaccactcaaataagttgaaaatttcgataattttttttcatcatcaacaccttcaagttgacacataattttctttgttgcttcaaatgaaccaaatttcattgcactttctggaaaaacttttattacatttaatccattaccaacataaaatgctttaattccaccttgtttataaatagtttctaattgatctaactaatggagattcaattttttgaggttcaatttttttatgtctaatttcttcaatttgatgtattagattatttttattcttcaatagagttgatgataaatcagttcttgcaataaggaaaactttaattctatctaactggtgcagtacaagttcttagaaacaacacctgataacccacctgctaaaaagtatccaacactattcaatatatcatcaccaactgtaacatcaccttctgaagataaattatctaaatcatcgttaaaaaatttatatgcagttcttattcttgaaccatcaagtcttggcatgaataacaaactatccctaaaagttgagtaagttatataacctttcttttcaacatcaagattttgaaagaaatttttcatttcttcaggagcaggtttacatcctatattagataaataatttgagacatcatcaggtgtaattttaccatcattatctttatcaacattatggaaacctttttctatttgtgattctgctgtcattaagtatttattaaatttatcaaaatcaattcttctatgtcgattccaaaaaggtccctttttagaattattcgagaatgatctatatatttcttccattgcaaatggtgaatccttcaatggatgatttgattctttcattgcatcttgaaattctttaaatgtaacataccctgtatgctttttatcaattgattcaaagatctgttgatgtcttttccttttatcatcaggtgattcatttggaaacattttttctattttggatataaattgtttgttttgatcttagattagctgtattttatataaaatttaacgttattattataatgctcattaacgatcaaattatgatgcaaataattgtacaatgtagatttatatttgaaatttcaatgatgaattaccgtccctttctctttctctttcacgattgcttaaaagtttcagaaaaaaaatattattgacaattgataggattatcaggtataaatttaaaatatttttattagatatttaaaatgcaattaactaaatcagctgagatgtaatactattaccacggtaaaccaattttcactttttgaaaagctaacttttccaaattgagtgatatatcaaatcaaagattaaagaaatatttataccttaaacttgagtaaaaaaaaaactctttattgtaataatttgctggggtgcagttccttgaaatttctcgtgaaaaatagacgcgacgtcactgcttcccactattttaagtattttttttcagcttctcatgaatttggtgttctaaagtgcatgaagttagaattcataagattatattgattattataagatagaaaggtgtctttactgctgattccggtttttaattaacatctactcacgggaagacaatataaagtagtaacataatgtctgttaatatttttggtgatcaagttacagaggaaagagcagaaaatgccagactttcatcattcgttggtgcaattgcagttggtgatttagttaaatcaactttaggtccaaagggtatggataaattacttacttcagcatctacaggtgaatctatggttacaaatgatggtgctactattttaaaatctattccatttgataatcctgctgcaaaagttttagtaaatattgctaaagttcaagatgatgaagttggtgatggtacaacatcagttacagttttatcagctgaattgttaagagaagctgaaaaattagttcgatcaaaaaattcatcctcaaacaattattgaaggttatagaattgcctctaaagttgcattagcaaaattagaatcattagctgtcgataattcaaaagattctgaaaaatttagacaagatcttataaatattgctaaaactactttatcatctaaagttctttctcaagataaagaatattttgctaaattagcagttgatgcaatactgagattaaaaggttcaactaatttagatcatatacaaattattaaaaaagttggtggtaaattatcagattctttccttgatgaaggtttcattttagataaaagatttggtgttagtcaacctaaaaaattagaaaatgctaaaatattaattgcaaatactccaatggatacagataaagttaaagttttcggtgctaaatttaaagttgattcaacaagtaaattagctgaattagaaaaagctgaaagagaaaagatgaaacaaaaagttgaaaaaattaaaaattttgatataaactgttttgtgaatagacaattaatttatgattggccagaacaattattcacagattcaggaataaattcaattgaacatgcagattttgatggtgttgaaagattagcattggttacaggtggtgaagttgtttcaacttttgataatccagaaaatgttaaacttggtcattgtgatcttattgaagaaattattattggtgaagatataatgactaaattttccggtgttgcaaagggtgaagcttgtactatagttttaagaggtgcaactgaacaactgttagatgaatctgaaagatcattacatgatgcattatccgttttatcacaaacaactgtagagactagaactgttcttgggggtggatgttcagaaattaatatgtcaaaagctgtagatcaagcagctcaaaatgaaggtggtaaaaaatctttagcaatagaagcatttggtagagctttaagacaattaccaaccattttagctgataatgcaggttttgactcaagtgaattagttaccagattaagatcttctgtatataatggtttaataacttcaggtttggatttaaataatggtgatgttgcggatatgaaagaattaggtatcgttgaaagttataaacttaaatatgccgttgtttcatccgcttctgaagctgctgaagtcttactaagagttgataatatcataagagcaaaaccaagaactgctgatagaaacatgcattgattgaatcaagttagtaattaaaaaaatcattttataatagtgttatcaaaaaaaagttttttttgtagattaattaattagtttaataaattagtaacgaaataaagttcatttttagttttgatagttattctttatataacagggatagacaataagttaatacatattaaaaggcatgtacatatacgtattatagtgtaaataggaatagaatattgagatgatagatctaaaagtttaaatctttgttgattttgaagtttcttcatgatgttcatcatctgtttcgtcttctaattcgaaatgatcaccattatcagcggattttaatttttccttttcttttctcaattgttcatctaaatccttttggccatcatcaaacgtatcaggtatttgatttgaatcatcaaatggatttttagaatgatctcctatggtactattaggatcttcaaatggattagcattatttgttgtagttgtttcaaaacttcttaaatcgtcaaactcaaagtcgttatcatattgttgttcaagatcaattgtttcattggtaggaattgcattgcttgctgaagttggaacttgagtagatgcagctaaaagatatgaagtatcagtaggcctccaaataatcgcaataccaataaaaacaacaaagtaaacacaagatggccagaaggtgactaaaacatcattaaatttccagaatttctcaattgattctgataaattatcattaaaaatcaaaatggttgaaataataaatgcaaataaaagtaataaaacacttccaacaataagtctaaataatttttgatacatctttaatttaactatttgtttattttgtaaaagcatttcagtagtttgctttaactgatgttataatccacaagtataatccaataaaaataattgaaagtggaatggtaaaaagtaagattatccatgagtctgaatcaatagagtctgatgctttagatgtatcagtggtagaggcagtcggctgtgattgcatagtgttatatgataaccacgcaacaccaacagagaaaatgaaatggagtccacacataattttacatccattcattaactttcttggtaatttaggataaacaataccataacctagtgaaataatcaacaataaaaataatgagaatgaaatcttgaatgcattcaaaatactaatgaaaacaatataaaattggattccaccaggtagtggatatgtcttattattgtttttaatctcgtataatgaccatgttaatatatcttcaatagttaagaaaacaaaaaaaccagctaaatatttttgtaataatagtaactcagatctgtgcttgaaaattgggaataaatatactgataagcaaactgcatatacaacagctaataaaccatataatgataaaagtgggatttctgatgctggtaagttaccaaatgcattatggaaattaacaatcatattaaaattattgaattcacctgtatatggcggattgaccgcagcaatacaataataaccagtttcactaacaacataactaaagtcattggtacccaattcagttaaaactgtggttttaacaggtgcaaaagttgtgacttcctcatcaataatgaattgatttaattgactttcagagcataaattttgagagattaaatcttctgtacagatgtatcttctaacaccatctttatcaacaactcctaataaatcaacatctttgtattcaaagataatgactgaaattccagcctttccagtagctggattttcataagcaaaatcttttagatcaaccttaatgaatggttcaacgggtcccccccaatcaactttactgtacatacctgtacaatactcagcggatttgccactgatcttgattttttgagcagataccgagcagattgtacaaaaagtgtacaatagccacaaatattctagatatgatgttcatctggatatattattaatactgaattaaagttatgatataaatcccgggttatccaatgaagatttagtttcgaaaatagaccaagaagaaaaagctgaatcaatcgtgtaaacagcttatatagaccttgggtaaattacatttagaactccattaatttattacgcaatctatggacaatatcgctcctcagaaaaattctaaagttgacatgaattagctattagtttttctcctacattattattattaatcatttgaacctttagtatttctagaataaacttatagtggggttttcttctacttttagcttcagatattatattgtctctaagtaacaatgctgagtgtacaatcaagaagaatttttaaccgttgctcggtcaggaagttgtctactgcagtcgaatcaaaatatttaaaaaaatatcctataggttcagagattagtggcttataaaattgaaagacttgaacaagtccctgaatttaatttagttgcagttggtttagaacatcagaaaacaggctcaaaacatttacatatagatagacaagataataacaacgtttttagtataatttttaaaacaaatacaccaaacaatacaggtttgcctcacattctcgaacatacaacattatgtggatcagagaaatatcctgttagagatccattttttaagatgctgaatagaagtttatctaacttcatgaacgctatgacaggtcatgattatactttttatccattttcaaccacaaatgtcaaagattttaacaatttgatggatatttatcttgatgctactctccacccattattaacctccgaagatttttatcaagaaggttggagattagaaaatgaatccacaaaggacaaaaattcccctcttacttttaaaggtgttgtttataatgaaatgaagggtcaagtttctgattcttcatattatttctggatcaaatttcaagaagcaatctacccctctttgaataactcaggaggtgatccatctaaaataacagatctctctcattctgatttgattgaattccattcttcacgttatcatccatcaaattcaagaacttttacttatggtaatatcccattaaaggatcatctagaaaaactcgataaggcatttattccattcggtaaaagaccaaccaaaaatgttttaaaacaacctattgattacacagaaaatgtagatactatagtcaaaggtcctgttgatccaatgttacctttagatgaacaatataagacatcattaacttggaaagctggtgtaccaacagatatttatgaaactttccttgtcaaaatggcatcatctttattaatggacggccattcatcaccactttatcaagaactaattgaatctggttatggcaatgatttttctgtcaattcaggctcagattcaattactgcagttaatttatttacaattggtttaaatggtttgacaaaggaaaaagctgaaaatttacaagaaaaagtttatgaaattctaagaaatgttaagaatgatggattcccagatatcaaagttcaagctcttattcatcaaatggaacttagtaaaaaagttgaaaattcttcttttggtatgaacatattaagctcattggttccaaattgggtaagtaatgttgatccaatggattctttgaaatgggatgatattattaccagattcaagactgaatatgctaaaaagggtgatgctttattcaaagaagttttagacaaatatattattgataagccatattttaaatatacaatggaaccaaatgagaattttgctaatgaggttaaagaggaagaagaaaccagattgaaaaagaaaattgagaaactttcagaagaagataaacaaactgtttatgatcgtggtttgaaattacttgaaaagcaagaagaacaagaagatttgtcatgtttacccactgttcatgttagtgatattgctagggaagttccatttttgagaatcaataacaaatacgacaatggtgttccaattcaatcaagattatcaccaaaaaccaatggtttatcatatttcaagggtttgaaaactattaaatcatctgaattaactgaggatttaatcccatatttaccattattttcaagttgtttaactaatcttggtactactagtaagtcaatggctgaccttgaaaatgaaattaagttatacactggtggattatcagctaatttctttacacatgcatccgcacatgatcctaatgaggtttatttgaaatttggaattggtggtgttagtttaaattcagattttaagaagatgttgtcattatgggaacaacttttacttgataccaattttgataatatcgcaaaattgagtacattaattaaatcatgcactgctgataacttaagtgatattgttagtagtggccatagttatgctagatctgcagccatctccaagatttctaatgttggtaaggttcaggaactattaggtggtattgaaaacatcaaattcatgaatgaaattgccaagtttgaatcgaacggtacattaaaggaaaatgttatacctcaactaaaaaaaattcaagaaattctccttaacagttcaggattacagtataatattacaacttctaaggatgctatcaaagaacaagaaagcgaaattttgaaattttccgacagagttaacttcaaacaaccatttagcaaaaattcttatgatttagggaagataaatactgaaaatttgaagaatgaatttgtcaaaattccatcgcatgtgggattttcatcagctgctttgaacactgcaagctatagttccaaagattctgcttcattacaaattctttcccaattattatcattccgttatttacatagtgaaattcgtgaaaagggtggtgcctatggtggtggtgcaagcttagacgcattaaacggtgttttctcattttattcatacagagacccaaagccatttaattcactagatgtttatgacaaatcagtccctaataattcaattaatattaaaaatgaaaagataacagaggaagatctggaacaagcaaaacttacaattttccaaagaattgaagcaccaaagagtgtcagagatgatggtatgagtttatttaattacgatattgatgatgaattaaaacaagaacgtagatatgaactcttagatgcaacactggaagatgttttagaggtaagtgataaatatttcaaagatgatacaattaaaagtcgtgtagtgattggacacgatactgaagatattaaagattcttctgattgggtaattaatgaactgagttagtttggtaaacgaattttttttcctgctgtacatagactgttattaaattcagatgtagatactatatttaagtccctgccatctttattttgtatataaaaaaaaattagaattaagctttgaaaaactgcattaaaggaagatagaattttaaagaagttagtatctgctgataacctaaataatatataatatatgctgaataggtattatgtatgaaatcattgtaactatcgataagtgttttaagtgatcaaccacaaaacctggcaaaaaaagtgcttcttcttccgagtggttaagttaatgtgtaaaatattttttaatgttgaaacaatgtagtatagtagcaaaacaaatggacaagtttttggcttaaaccgttgttcatattaacggttttttgacataaaacattggcacagaattaaaattgattccagtttaaaaaaaaactagtattgagcaatcaaaaaattcataaaaatagtagatccaggccttaattttattattgttcggaaagatgaacaaggttgtaatcgggacttattttgaaataatatgatttgagatcgaggccataatataaatagatcctgacatattaaaatcatgaaaagcaggtatgcataaatcgcggtgacttgaataaaataaatccgaagaactttagagaagaataagagttgcaacggataaccccagagaatcttcttagttcacttatatcttacaatttctatacataaacttccaattgtaaaagatgacaatgtatagtctattatgtgcccatgatctaaactaaaaatgttttccgcagattccctaagataccgagatatattccaggtgtttggtctttccctaagattggacattagattatgcatatctcaatgaataattaattgtattttgaaatttgaattatcatgatatagatagtcaaaaagcttttttaaatactgtatctattatataagcttatagtatatagcttatagaatatcttatttgaatagagggtctcaataaccgaactaccgactaaccttgataccaaacaataaagttgaagcgatgacaacggaagaagctaattccagtaattattttttaactaaatcttgaaggtaatgtacagtttcttatatctgtttaacaaatggctaaaggtgtagttaaactgtaaaaagaaacagtaataaaatttcgaaaaatgtaccatttgcccttaattataattggctgattataaattttgtaccgctaaagaatttgccggggtaattttttctggcggagaagcccgacaagttatttaaatttctctttagagaactttaagccttgttttggttacactatgaccttatattaggttattggatagagcaactgttgattacagtaaattgaatactagatgttgtatattgaacttatgttattaatcatgttagtactttatgtcacattcaatgaaagaaaaggatttagttactagtcagaatgtagtattttcttaagaaattgaaagggttaacaggggtgaaaagtccatagaacaaacttataatttgttaatatttcaatgcaaggaaaactataaaattcaaaaaagaaggctcaaaatgaaatctaacgtgtcaaacagctgcacaatagtgttaaaaatttttttcgtccactaatgctgcattattttttgaaaaaactgttttattcatgcatcaaaaaaataaaaaattcaataattgcgctaaaaaaacggtgactggaaaaacatccatttcttccataaaagcgaagatgttcgccctttttccatacaacttatcttttcacctagtccttgatttaaatcaatttttttttcgttcaccaggaaactaatactaatataacaatacttaataaaatgaatttcacatacaacttttttgttttattcataatggcttttttacaatgtactaatgctgctgttattaatgtagcagcagcaattgttggtggtcacaacaacgcaattgaatcaataaatattcaaccaatcaaagcaatcactgcaggtgaaattattccatcttcgacatttgtacaatcagtatcagcttctgctactgcaattacatctgccagctcagctccttctgcttcatcttctgcttcaaatgttccaattgcttcagatgcagaatttgcaaatggttctttacattacacaatcaacaataacttgcttattatttcaggtgttgtatcatgtgcacttttactttgaaaaagtccccttttacgattataccaaatgtacgacattacattcatttatagagaaaaattattttatagacaaaatttttcaatcaattttatagacatttatagacatttatagagattaattttaatcatatccatactagctatcacaaatgtaaacacaattctgctcatcacattatgattgataaataattattgtattgatttaaattacctagattacctaaaataagtacaaaaaatttggattttgcgttaaaggaaaattacgagttttattgtgccaaattcataatatatttttcggcattatttatacaataaactaaaacggatgaaataacagttgaaaagagtatttaaatagagttactctagttcgttaatataataaattgattgctgtttttccatcaacgtatcgttgaaaagaaaagcgatgagaaatattaaggaaatatcatttttaattaactaaatctcaaatcatggtacgattttaaaaacttaaacatttgtgaattattgcttaatcagatatattcataaataaattatactggtgaaaagtataaattgtatagcttaacattagatacaatgttacgaatgcctaaattctttgataagaagagctgagaatatcaacatgttgctgtatattaataccacaaatattaagtttttcaatttggaatacgacacctcaatatcaggatacccttcatacattgaaaagatttgcgaattgtttagtgggtattatagttgtttggttaaatcctgaaatgatgagtgttacgaatctaccaaaccatcgttacaagatttgaacggacaacaccagttttaaaagtaactaactcctcgacaattggaagaattatatgagggggtaatttcttcccgaaaagaagacgttaattaattaaaatatacaacttccttcgtagaaatctattacttgactggcaacagccctccactatactaacttcgtaacccttttaacctctaattcctaaattaataaggcctagattaggcgcatatacatgaaacaaaattcaatcaccatagttgtcatagttgttctatacattacttaattaaaaacggcaatgttgataggctaataataaaattggcatctttcctgatagagggatagaattggtatgtatcgatgaggtaaaacaaaacaattttaaattatacgccattatgaagacaataataaaacgtaaattttggatcaataaaaaagctgagattccaaatcaggaatgttactttttaccaatttcactaagccagctctcaattccctagtaattgatacatgtgatgttacttaaatttttcttggtcagcaagacttcaccaataacgaattaaattattattagtgaaaagtttaacaatagtaaaatacggcaaataataatacgagaagcgagatcggtgaatgactataaagaacgagggaatgatttttcgaaataaaattccttgcatgaagataatgtgatagcaacaaaaggtgtgcttttttaaaattttaatcacgcaagaacgcgcgtattacacactttttcaattgtacgagtaatttcaaattctattattttttttcatcatgaattcgtaatttcaatttgttgccatcagcggatttaaattgttttttttgatgcagtcctcaatgtataactatcgtttatgacctttctataattttttttctctctgtcccgtttctttatttgtataaaagtaatctctaagaagcttttttattattagctatgaaatttagttattccaattgaattatccaaattatttaaattatttctatttacctgtcttttttcaggttatttttcatttcttgtttattttatttccttttgtttattatccattgctatctttattacacaacacatatacccatttaattagttcaaataacttagattacaagttaaacatatatcaatacaattaaatgactaaattaatagatagattaatattaatatttttattcatattacaggtttgtagtggttatgaaattactgaaacctcaaatgttttacaaaaacgtgaacaatattcaacaatttatggttctcaaccaagtgctacagttttaaaaactgttgcaactgcagcatctgcttgttcacttagtttccacgatgtaggttatcctgcagcaactgtttattactgatccaattgttaaacaagtcggtgataatctttatgaaggtacaatgacatttagtggtgaatcatgttcagaatttgattacgctaaagaaattaaacttgacggtgtcaagggtaacgttgttttatggtcttacaataacatccaaaacaaagataatggtattaattacgttaatggttgtaattgggttacttcatttctcttctatggtgactatgatgctaaaaataatagatattgtatgaggggaggatcacaaattcaatatgattggtattctaataaaaattccatggattattcatttggatgtggttcacaaggacagttccaattatcacaactatgttggccagctgaatttaaagcagattcatcctcatcttcctcaacaacaacatcatcatcatcatcatcatcatcatcatcatcatcatcatcatcatcatcatcatcatcatcatcatcatcatcatcatcatcatcatcatcatcatcatcatcatcatcatcatcaccatcatcatcaccatcatcatcatcatcttcattatcagctgctaatattacaccaatcagcggaggccaaactacaactgcttcaagaaaggcaccagatgcttgtactttccaacaaggaccttgtgattcagactacgattgttgtcaaggattaatgtgtgataaactttctaatccttactggtatcattgtgtcgttgatcctaatcaaaaacaatgtacgcaaataaatgctggatgtcaccaagattctgactgttgtgatggcttatactgtgacaatccaaccaatccatattactcaacatgtatgttaggcagtagaaccgcatccattccatctgcatcatcaacaacaactacatcatcaccaacaacaacaactacatcatcatcatcatcatcatcatcatcatcatcatcatcatcatcatcatcatcatcaatcaaccatcaatcatcatcatcatcatcaccatcatcatcaatcatcatcatcatcatcatcatcatcatcttcattaccagctgctaatattacaccaatcagcggaggccaaactacaactgcttcaagaaaggcaccagatgcttgtactttccaacaaggaccttgtgattcagactacgattgttgtcaaggattaatgtgtgataaactttctaatccttactggtatcattgtgtcgttgatcctaatcaaaaacaatgtacgcaaataaatgctggatgtcaccaagattctgactgttgtgatggcttatactgtgacaatccaaccaatccatattactcaacatgtatgttaggtagtagaaccgcatccattccatctgcatcatcaacaacaactacatcatcaccaacaacaacaactacatcatcatcatcatcatcatcatcatcaccatcatcatcatcatcatcatcatcatcatcatcatcatcatcatcatcatcatcatcatcatcatcaccatcatcaccatcatcatcatcatcatcatcaccatcatcatcaacatcatcatcatcatcatcatcatcatcatcaccatcatcatcatcatcatcatcttcattatcagctgctaatattacaccaatcagcggaggccaaactacaactgcttcaagaaaggcaccagatgcttgtactttccaacaaggaccttgtgattcagactacgattgttgtcaaggattaatgtgtgataaactttctaatccttactggtatcattgtgtcgttgatcctaatcaaaaacaatgtacgcaaataaatgctggatgtcaccaagattctgactgttgtgatggcttatactgtgacaatccaaccaatccatattactcaacatgtatgttaggtagtagaaccgcatcaattccatctgcagtcatcaacaacaactacatcatcatcatcaatcatcatcatcatcatcatcatcatcatcatcatcatcatcatcatcatcatcatcatcatcatcatcatcatcatcatcatcatcatcatcatcatcatcatcatcatcatcatcatcatcatcatcatcatcatcatcatcatcatcatcatcatcatcatcatcatcatcatcatcatcatcatcatcatcatcatcatcatcatcatcatcatcatcatcatcatcatcatcatcatcatcatcatcatcatcatcatcatcatcatcatcatcatcatcatcatcatcatcagctccaagttcatcagttattgcaccttcatcagctccaagttcatcagttattgcatcatcgtcagctgctagatcattcgctgttcaatcatcagcaccatcatcagctccaagtttatcagttattgcattatcatcagctgcattatcatccgcggctagatcatccgcttctcagtcatcatcacaagtattaagatcatcgcttgatgctgaacatcacaccgtggttttatcatcatcagcaccatcatcagcttcaagtttatcagtcattgcaccttcatcagctccaaactcatccgctgttcaatcatcagcaccatcatcatcaacaccatcatcagctgccagatcatccgctgttcaatcatcagctccaagttcatcagttattgcaccttcatcagctccaagttcatcagttattgcattatcatcagctgcattatcatccgcggctagatcatccgcttctcagtcatcatcacaagtattaagatcatcgcttgatgctgaacatcacaccgtggttttatcatcatcagcaccatcatcagctccatcatcagcttcaagtttatcagtcattgcatcatcgtcagctgctagatcatccgctgttcaatcatcagcaccatcatcagcaccaagttcatccgctgttcaatcatcagcaccatcatcagcaccatcatcagcaccaagttcatccgctgttcaatcatcagctccatcatcatcaccaagttcatccgctgttcaatcatcagctccaagttcatcagttattgcatcatcgtcactaactccatcatctgttgatgtcaaccatgtttcatccacatcatctttgttcataaattcctcagttacttcttccttgttggtcagtacacatcatgtttccaagctcactactgataatgatgatttgacaacatcgacaacatcgacaagggcacgaccacacattgtccctatcactgctttctcaggaggtgaaaaatcgcacacatggaccacatcagaattatcatcatctccatctttatactcacaatcatctaatagtacatccaattcatcatcaataccactttcagcaaaaactactaccggtccacaaccaatagtttcatctatggatcctaatcattttacttcctctttaagttcatcaataaatccagatcatcattcatcgtcattattttcttcatctttatcaacatcctcattatcagtacaatcttccttagtatcttctatgattagtactgagttatcatcatcatcatcatcatcaggtccaagttctttaattatcgagtcatcatcatcatcatcatcatcatcatcatcatcatcatcatcatcatcatcatcatcatcatcatcatcatcatcatcatcatcatcatcatcatcatcatcatctatggatcctaatcattttacttcctctttaagttcatcaataaatccagatcatcattcatcgtcattattttcttcatctttatcaacatcctcattatcagtacaatcttccttagtatcttctatgattagtactgagttatcatcatcatcatcatcattaggtccaagttctttaattatcgagtcatcatcatcatcatcatctatggatcctaatcattttacttcctctttaagttcatcaataaatccagatcatcattcatcgtcattattttcttcatctttatcaacatcctcattatcagtacaatcttccttagtatcttctatgattagtactgagttatcatcatcatcatcatcatcaggtccaagttctttaattatcgagtcatcatcatcatcatcatcatcatcatcatcatcatcatcatcatcatcatcatcatcatcatcatcatcatcatcatcatcatcatcatcatcatcatcatcatctatggatcctaatcattttacttcctctttaagttcatcaataaatccagatcatcattcatcgtcattattttcttcatctttatcaacatcctcattatcagtacaatcttccttagtatcttctatgattagtactgagttatcatcatcatcatcatcatcaggtccaagttctttaattatcgagtcatcatcatcaacaacaacaaccacatcatcatcaacaacaacaacaactacatcatcatcaacaacaacaacaacaacaactacatcatcatcatcatcatcatcatcatcatcatcatcatcatttatatcaattcattcttccattgatccaagagcaccaatcaccagttatccaccttcattatcaaaatcagttgctgaatcgtcaatgtttaacaattctttacatttaaccaaactttcaacaattcaaggtgttgaaacagaagatttcgataaaataaactcaagaacaattgttacagttgttacagatgtggaaaccttaactacaacagtttgcgatgaaaaaacatttgttgactattcaatcactactgaagtttcaaatgatgttacacaactcaaatctgttcctactacaatgacggaaacaattcctttgacaacctcaatatatacaagcctagtcactagaactattaccacatgtttagaagatttggtacaatctgattcgagtttgaattctgatctatatttcacaacaccaacaaactcaattttgtattcttcagctgatgaaactattactacaacaattgttgaaactaacttagctgcatccacattatttacagaagaaactcaccttcttcataccacttcaactgtaacttcaaatggtgttacagatgttattattgctacatcaaccattactgaaagaattgcaactggaactacaattataagccagttagtcaccaagaccatcacatattgccctggaacaactgtttctactgtaataccaggtgatcattcagtatcaagtggtttaaccgaatcatcaccaacaacatctgatttcatatctacagccaaatctacattcatacctacatttaccccaatatctaccccaagtggtgtttcaaatgaaggaaatccagaatttgaattttctaatggctctgacaaacttttattcaaccacagttacatgattttaattatttcagtcatttcatcagttttcctattctagatattccaatttttgaaattcgttttttattgtttttatcagtttatttttgttactattattatatcattattaactttgcttttctcgttgttatttcaatcatcttttttttacctgattgatatatataaaccaaacttttttatagacttatatagaaaaaaatttacatttttttagttttagctgctaagccaattaaatttttaatcgttccactgatagggaaacactttccgcgcctgtatgatctttgcacctcagaaagcttaatttcagcctgggatcatcactttgctagtggttaaagtacattatttttcttttctccatcttcaaacattgtaatgggtgacagaaacgcaaatccccaagttccaaaaggttggaaagctgtttgggatgataaatataacggtaagtgcattgattcataatctatctaattttggataaacgaacttaatactaacgagataaacatagaatggttttatgttgatgagtctactggtaagtctcaatgggaacctcctaggggtactgtattcccacaaaatagttctccgcctgcatactcaagaccgtcagagcctttgaggcgtcaagttcaaccacaaccacaaccacaaccacaaccacaaccacaacaacgatcataccaacaaccaggataccaacaaccagcatatcaacaaccaatgtatcaacaaccaatgtaccaacaaccaatgtaccaacaaccaatgtatcaacaaccacaatacattcagcaacagcctcaacgctcatcacgaggtgggttaggtactatgggtggtatggcagttggtgcagttggtggtttactactgggtgaagcattagatggtggtcatcatgaagaggttaataattactatgttgatgataatggaggttatgatgataatggttttggtggaggagacttcggtggtggtgatgatttcggtggaggagattggtaagtttcaactacatataattatcctttgtagtttcctctttaacttttaaataaacttattatatataatatacataatatattacctgctttcaacagatctaactaaatccgagaacaactgttataatcaatttattcgcacgtctattaatttaatttaacatgaatttgatgtgggcttttattttacgtaattcatatacagtacagttatatattcttggacgtgttcatgaagtttacaatataatatagccatatatttataaaacttattcaacaacaatattgaacaattgaatgtccgaaaaaaaagaaagaggacagaaaacgacaaggcatttagttgctggattttcaggtggattgacatcagcattggcccttcaaccattagatttaataaagactagagttcagcagagtaaagataactctcttatgagtgtacttaaaagtataacttcagtgaaacaattatggagaggtacactaccaagtgcaattagaacatcagttggtagtggattatatttatcaacattacatttagccaggaataatatttccaaattgaaaaattcccaagcacctatatttaatgcttcatctaaactacccaaattgaaagcatatgagaatataataattgggatgttatcaaggtcaattgttggatttattactatgccaatcacagttattaaaattagatttgaatcaaatttgtatcaatataaaagtatcaaagaggcagttattgacattttcaaatataatggaataaatggattctttagaggttttggtgcaacatgtctcagagatgcaccatatgcaggattatatatttcatcatatgaacaattgaaatctattttacctaaattgatgaatttacaaaaaaattttgatcataataataataataataatacccaagaactaggtcatttatcttcaggaattattaattcaactagtgcaatgattgcatctatatttgcaacaaccgttacagcaccttttgatacaattaaaacaagaatgcaattatcaccagaggaatttacaacttttagtcaaaccagtattaaattatacaatgaaaattttatgagattttttgatggtttatcactgagattaattagaaaggcgggtagtgcagcaattgcatggtgtatatatgaagaacttgtaaaaatttagtataataataaataatgaatgatagtaataaaaaattttatagagttaaccagtgttcataacttagttggggtataacaaattgacaatttaattgacttacttgttcatgatttaaaatacttaatgcacataatcctaaaaatgaatgcattggatcaggaaattcatcaggatctgtcgttttattgaagccacccattttaaaattttgtgttttatttaaaaggaaatctagtgctttctttgtattcactatattatctaatgaaagtaattttaatgaagctaatgaccaaaatacataacatgtatcaccatatttattgagtctaccattaaatcctccaatatcttccatatcagcatattcattccaatcatattctggtttattgaaagtattaaaatctatttgacgatgtgttaaaaagtctaataatgatttatgattaaatttattaatgtgattaatattaaacaatgaatcaacagcacaaaataccattccacaatgagattcatcccctgggtacattgaaaatcccccatcataagactgtaattgaaggataaatgaatataattttggaatatctattatgtcaccaactttactactatcttcaactaatattcgagatattgtagttgcaatcataacataacgtaaatctttaacatatttactaagaagaccattagtgaatccaccatttgataattgacaagctttaacaaaattgagaattttcctacgatcaattcttttaaaattgtcttttaatatgagcaaacattgtaatgaaaaacaagttgcagctaattccatcgattcttcagttttattataaatcaatgaaccacaaaatcctgaatatttatctgttgttataagatgtgagtatatgaaatcaatgaatttttgacgttcttccaccgtaaatgaggtttctaatgtattcaataattgtaatgaagctagagagaaataagcaattgcaagtttattactatcttctgattgatatttactcggaagaagtgataaaaatcgtttatgacacattgtgtgcatttttacattaatcaatccatccattttttttttttgtagttagttagtggaatatgcttgttattattagaaaataatataaaatacagagacaaatagtttacatacaatgtaaaataaaaatgaagataaattaacaagaatcaatgtaatgaagatcaatagaaagtaagaaacctgaattttcaagaagagcaataatcgatttaatgatttttttcagtgcgtatttgaggggctcaactggtgaaaaaattgtatgcaatttgtcttcatttacaatcaatgatggttttaacactgtctgtaattcattaattaatactgcacaactttgagaaatggtgagatcattggacttatatattgaacataatgcagaaaccagctctgtgcattcgttataagtgtacattcctttcataatagatgttattgacaatatgacaacattagaaaatctactatatagtaaacatgattcaggtaatgtaaagttggataataagtctttaattaatattatattttgaattgttgcatttgaaatgactgtaaaattaggggtatcaggatcagggaataaatttgaaggtttaaatagtaaagataatgtataataatattcaattgacatccataccgcaaataattgcaatgttgaacttttcaaatgagtatttgtcaaatttgatagagtaattctacactcattataccacatatcagcatcttgtcttaataatgataatttaataaatttactgtcattatcatcaaaagtatcactttgtttagatagatatagttgtgaaataatttttgattgaattttacataatttaatgatagttatttggaaacaaattttttgttcctcatttttggttattgaaattggtaaggggacattaatattcattaattcaaaatttggttgctggaaagttgttgaagagaataatgaatctgttataaaaatagtccaaaataatctatttaaatattcaacgtcagataaagttattccttcaatatttgaaagttttaaatttgaaagtttatccaaatgccatttttgggtatattttgataaaattgattgtataaaccaagaagtgtcaattgaagaatctgaaagaagtgaaattaaacttaacaataccaaaagtctcaatatttgaacgtttgataaaggatgagactttcttttaagtaatttgaatgccatagtaaatgtaaatttaagataatttgcagaaaattttgaatctgaatccgaatccaaatttgatttagaatttgagttgtacttggaattagagaatatgattgaacatgtgtataaaagcaaaaattcaattgaattatagtaatcatcaattagttgattttcaccattccaattgaatttaccacttttaaaaattgatagtttttgcatcatcaaggaggaatcaaagaaaataataaattctaataatgttagaaaattttcatggtaatttgatgataagtgattactattattaataaaggtaggataaatattttcatcaatatagcctatttgattaaatatcaaataaagtacttgatattggaaagaatttgatgatgcattactaagtaaatcaataacattaatattatttgtttgtgatacaggtgttgagaattgcaaagaatttcgatctgaactatggatattagttggtgagcatgaacgtaaagaatgactaattgatgagcaagagttttttcttcctttatgtttatttattctaaaatcagaaaatgatgaagttgttgtagttgcaggtattggtattggtggtaaggcaaaataatttgcattaggtgaaattgataaattattattaaaattattattaaaattattagtatcattgttaatatttgaagataatgaataagattttaaagatgatgatggtaatgagtctaaagctgatgtcggggaagatacagaacctatattaattggaggtaattgaactgaaattgatttccttctcagaggtatagttggtgataaaggttgtgggggtgaaatattattaaccagaatttgtggaatcataatatttgaaaatttattttgattattttcaatttcttcatcagtaactgatgatagagatgaatttggagaactgcttaatgatcgattgtaacttaaccgtctttagatttcttctcttgtttttacgctcaacatattcacaagtttcattttgtttagtacaattttgacaaacaggaagggttttagaacatttctttttgagtcgacgacaacgaatgcaagcatattgatgaaattgttgctggtttttatcattatcagttgctgattttaatgttgcagtagctattaatataggctcaagcgacattgtacggttaggaaagaagtaaagaactataatgtttaatggatcaaatgatgattcaagaataaataataatgtaacagtaatttgaataaattaaatataataatcatgcatgacagtagtaaataataggctgaaattttcgccaataccgttgataataataataatgttaatcccactccattatagactgtaaaactgtaagaatctaagggtccttttctctaaagtgcgaaagcagttgcagcatttttcaccgtcatgtgtcattcattaatcattaaccaatttcaaactcactccgaaacccgaagcggatatccgagcccctctttttaatttaaagagtcaacttccgttattaccgtttttccgtttttccgattatcttgaaaaaagaggcgtagaagaaaatacgaggcctaggttcgactcatcgaccccttcttcttcttcttcttcttttcttttttcttttttcttttttcttttgatagaatatatttttcttatttccggcactaatgcacaacttaattccatgaatattaaaattactctagactaaatcttaattatcagttgttcactagtgtcaaacaatctctacattttccaaaagttttttatcaatatttttagatctatctatcactttgatattttttaagggcactaactataataataagataatataattatatgatcaaatgcagaatactctactaacttatccctatccccatcaacaacaacaacaacaatcacaacaccatcaccatcatcatcatagccctcatcatcaacaacatccaatatctcacaatcatcgttatcagaggaataattataaacttaataaatcttcaagtttatcttcttatacaagtagatatccattatatgcaactgattggtctttccaaaataatacttctcgaatattgttatcatcttatcaagaagattcaactaataaattacaagttgtatatggtacattaaataataatttatcgttatcggaatcaacggatccaattgattcaataaattcaatttcttcttcatcaatatcatcaacttcttcatcaaatacaaattcatcttcaaataattctcatttatatccattttggaattttaataataaatcatcagattgttcagttaaatatcctgtatctcgtgttcaatgggatccttcaatgaataatgaacgttttgcaacaacttcagaatgtttacgtatttatgaagttgatcattcatctccattaggtacaaatataattgaacgtgcaaaacttttcaattcaaaaaatttaaatactaatcaattaccaccaatgacatcatttgattggaataaaacaaatccaactgatcttataacttgttcaattgatacaacttgtactgtatggaatttaacaaaggaaacttattctgctaaaactcaattaattgctcatgataatgtagtttatgatgttaaatatatttttggagattcaaatattttttcaagttgttcagctgatggatcagttagactgtttgatttaagaaatttagaacaatcaacaattatttatgaatctacaaataattcaaaacttgtaagattatctacatgtaattataatgctaatcaaatagcagttttacaacaagattcaaatgaaattattatacttgatttaagaaatataagtttaccaatttataaattatcaaatcattcatcaactgttaattcaattgcatggcatccttcaaaaaatatattattaacaggttcagatgattgtcaagcatttatttatgattttgaattacattcacaaaataatgattttaatgtatctaataaagatttattaccagtatctaaatattcaactgattctgaaattaattacgtttgttggtctcctaatggtgaatgggcaggtctcaccagtggtactcaatttcaatcttgtattgtctaactgttaattatatagttgtgagagtcaacttgaaagtcatcaaggagaagtcttatttaattgaagtcagagtcaacaaatattgaaggagtcaatataaaacataagagtcaaatgtttttttaaagagtcagtgtgaaaatgacttctcccacgttgactcctcccatttaagataaagagcttcaaaaaaaaaattatttagtattaactgttacttatacaaggtatccccttataaaaacctgattatctcttcaaaaactgtattcctactgtatatttcatttgtaaccttttttaaatacccattttacaattattatttccattgtgattatttagcaattgaattaacatctctccttaaagcatatatcatcaaaatgttaagaagtagattatcgcgtgtcaatcacacaactaaattcttatctcaatttgtaagattacaatcaactaattcatcaaaagttgatgtatcttcagaaaaatactcttcattatatagtataactaatcaatttgctgatttagatactttctcaaaaagacatttaggtccaaaaccaaaagatgttcaatcaatgcttaaagatgtcaattcaacaaatatgtcagattttatttccaaagttatccctgaaaaggttttcattggcagaaaacttgcagttcaaccattaaatggttactctgaaactgaaatggttgatagattaaaggaattagcttccaaaaataaagtttatcgttcttatattggtaaaggttattatggtacaaaattaccattagttattcaaagaaatttacttgaaaatcctgcttggtatacctcttatactccttatcaagctgaagtttctcaaggtagattagagagtttgttaaatttccaaactgtggtatctgatttaacaggtttaccagtttctaatgcatctttattagatgaaggtacagctgctgctgaagcaatgattatgtcatataactatacaagaggtaaaaaaaatatttattatgttgattcaaatatccatgaacaaacttattcagttttaatgtcaagatcaaatactttagatattgaaattaaagtaattgatttattctcaaatgaaggtttccaaaatttaaaggaaaatattgataatacttgtggtgttttagtttcatatcctcaaagtaatggttccttaccatcaattaaaaaattacaagatatttcaaatttaattcattcaaataaaggtttattttctgttacttcagatttattagctttgacattattacatccaccttcaagttttggtgctgatattgttttaggttcatcacaaagatttggtgttccaatgggttttggtggtccacatgctgctttcttctcagttacaaaggcattacaaagaaaaatgccaggtagattaattggtattactaaggatagattgaataaaccagcattaagattagcattacaaactagagaacaacatatcaagagagaaaaggcaacttcaaatatttgtacagctcaagctttattagctaatattgcatcaaattatgcagtttatcatggtttagatggtttaagaaatatttcaaacaaaatttatggtttcacttctctgttagcaaaggaaattaaggaaaatactagtcataccattgttaatgattcatggtttgatactttatccattaaattaaatggtacgactgcagatgcattattgaaaaaggcagttgatgattatggtattaatctttttaaagttaatgaatcaactgtccaattatcattggatgaaactgttgctcaaaaggacttggtagatttaattgaattatttactggtaaaaaaattgatttaactgatgttaaattacctgaattaccaaatgaattaatgagaaaagatgttattttatcaaatccagttttcaataaatatcattcagaaactgcaatgttaagatatttatattcattacaacaaaaggatatttctcttgcatcttcaatgatttctttaggttcttgtacaatgaaattaaatgcaactgttgaaatggtatcgttaacatggcctgaatttggtaacttacatccatttattccaagagatcaagcaagaggttatatggaattaattgaagaattagaagctgatttagcagatattaccggtttccataaaactactttaatgccaaattctggtgctcaaggtgaatatactggtttatcagttattaaacaatatttacatgttattaagggtgaaactcaaagaaatatcgttctgattcctgtatctgcacatggtacaaatcctgcaagtgcaacaatggctggttttaaagttgttcctgttaaatgtttaagtaatggtaatttagatttaactgatttacaaaagcaagctgataaatattctgataaattagctgcaatgatggttacatatccttcaacttatggtttattcgaaccaacaattattgatgcttgtaagattattcatgaacatggtggtcaagtttatcttgatggtgcaaatatgaatgcacaagttggtttaacatcacctggtgatttgggtgctgatgtttgtcatttgaacttacataaaacttttgcaattcctcatggtggtggtggtccgggtgtcggtccaatttgtgttgcagaacatttatctgatttattaccaaaacatccattaggtgcaacttcaaatagaagtattgataatgcaatcgaaccagttgcctctgctccatttggttcagcatcaattttaacaatcccttatgcatatatcaaatcaatgggtggtaacaatattccattttcatcagcaactgcaattcttaatgcaaattatatgatgtatagattaaaggatgcatataagattatgttcttaggtgaaaatgcatcaaacactcaaagtgatgataaaattaattactgtgcacatgaattcattattgatattagaccatttaagtcaattcatattgaagcaattgatgttgcaaagagattacaagattatggattccatgcaccaactatgtcattcccaattccaggtacattaatggttgaaccaactgaatctgaaaataaggaagaattagatagattcatcaatgcaatgttatcaattagagaagaaattcgtcaagttgaaaatggtacaagtgatggagcaattttaaagaatgcaccacatccattgactgatttattagaaacttcagaagaagaatggtcaaagagaggttataccagagaacaagctggtttcccattaccttatttgaaaaatttcaaaacttggccaactgttgcaagagttgatgatacttatggtgatttaaacatccaatgtacttgtccaactgttgaagaagttgcaaatatgcaaattgaaaattaatttttaatgcaagtcatttttaattaattctagttttttattagactgtatttttatagatttatttaacaatataattattcgtatttcctgtttttttaattgattcctttgtatttttgttgttgcagaatttcaattggtgcattaaccttataataagtggctcgtcaactttaattagccaataacacgcggcctatttgaaataaatttcaaatcgtgcattcattatagttcacatgattgaataaatatgacttaaagttataaatataaaaagacagtacaaaaataaataaaatattatataagaatttgctatattcattttataaattataatttgtttttaaaatagaatgaataaaagggaaagtttataatttaattatgcaacataaattgttgattgtaattgataatagtaaaaggatatttggtttgtttgttattagaatggaatatttttctttttcattaatatatatatatatatatatgatgattaaattgattatctatcaacttcaccgaagaccaaatccatggtaccaataattgcaaccgcatcaggtaataaatgacctcttgaaatatgatcaaaagcacctaaatgagcaaaacctggggttctaatcttacatctgtaaggtctttcagaaccatcagaaacgacataaacacccatttcaccctttggagcttcaattgcagtataagtttcaccttgaggaacttgataacctttagtgaaaagaaggaagtgatgaattaaagtttccatatcgtttttcattaattcttttgaaggtggagaaatcttgaaatcttcaactttaacaggaccagctggcatatcattaatacattgttctataattcttaatgattgtctaaattctgccattctgactaaatatctatcataacaatcaccatttgtaccaactgcaatatcaaaatcaactaaatcataagcatcataaggttgagcttttctaatatcataaggaataccagaacctcttaacataacaccggataaaccataagctaaagcatcatcagctgtaacaataccaacatctatagttctttgtttccaaattctattatctgttaataattcttcagtttcatctaatctatcaccgaattgagttgcccacatataaatatcatctaataaaccaaatggaatatcttgtgagacaccaccaggtctaaaataagctgaatgtaatcttgcacctgaaactctttcataaaattccattaatttttctctttcttcgaaaccccataagaaaggagttaaagcaccaacatccatggcatgtgataaaacagacattaaatgatttaaaattcttgttatttcactgaataaagttctaatatatttagctctaattggtacatcaatatttaataatttttcaactgcaactgcaaagacttgttcatttgtcatcatagagacataatctaatctatcaaaataaggtaaagcttgaatataagtttttgattcaattaatttttcagtacctctatgtaataaaccaacatgaggatctgatctaacaatttcttcaccatgtaattctaaaatcaatcttaagacaccatgagcagctggatgttgaggaccaaaattaagtgtaaaatgtctaatttttgattttttaacagtatgatcaggagaatcttcatttgataaattccaagtttcccaatttgatgaatcattaataaattcagaataattacccattgcagaattaatttctaaattaacagttgatgtaaaaccatcatcatgatttgaatttaaatcttcaggactttcttcacctttattacctcttttctttataacataaaaatcattatcatttgcagattgttcaattttatgaatttgaggcatttgctttaaaacatttgaagttgaagatatattttttgataataattttgagacattataactataatttaaattacgattaagttttaaatttgctcttaaaacggaagaaagcattatgtataagtaatgttaatcttaattaattctgtaattggaagaggtagggatccctttgagtaattaagtttatactaacttgaattataaattatgaatcaaaactaaaattaagatagtattatgtttaaaaaattaatgttgtaattttgtcgattgtggttggttgagtgtatttttcctctcttagtttttccaaattctttttttaccctcccctcactttttgacaaaaattgccggaaatttagtacttgaattatacatgaaaattccgaaatataacaattacgtaaccaacaattattgattacgtaaccggcattttttttaaaaaaattggtgtacaggggtaaattaaaggttatattacgtaatgtataatttttctagaaggtcctaatacttagtaaaggctttaatttgattctttaatatttcacacgggtcttagtcattactgttgtctagtactccgttaatcggtattgtattggcatgatattactttttatttcctatttccattttattcataatattcgttttaatgacatcttcatattttttatgggtgatcatgtatttattcaaagccatgtaatatttttatcttcaaggcaatatccccgtgtattaatgattataatctggcggattttaacgctttctttttttatttcctatttcgtgggtttttttcgatttttcaatttttttgatatttaatatttaaattattcgccttccgggttaaattttaatcattttcaacttttccagttgtctctttactctgttcttcattctgttttaacaaacaacaaacacatattaattaaaaaaaatgccaagaaactcttcaagaagaccagctccagcttcaaatgcaggctcaaagagatctgtatttggtggtaacactcaatcaagatctgcttcaactatggcagcaccagctgcttcataccgtggtccagcaactacctcctgctgctcaagctccagttggttcaccagctgctgctgcacctcaacaaccaggtttatttgctcaaatggcaacaactgctgctggtgtagctgttggttctgctgttggtcatactttaggtgcaggtttaacctcaattttctcaggttcttcttcagatgcacctgctcaacaacaacaagttccaattcaacaatctcaaggtttagctaatgaaaataacaatgcctgtgctgctgatgcaagaaatttcactagatgtttagaagattcaaatggtaattatcaagcttgtgatttctatttacaacaattaaaggcttgtcaagctgctgcaagtcaatattaagttatttaatatagaaaaaaaaaacaatttaaattattaatccaatatattcaatatcactttttattgttattaatcttattattcaaagattgaatctataccattacccgttattcatacagtatagattttagataaatagaaaaaaaaaacttagctttgtacttacgccctcttatttgtatacattcattactttattgcattatatacatcccttgtttatatttttaatcatctgcaagtaagctctttctatcggatttattatttataactattgaattatatagtaaaagtacataacaattatatatcgtcttggattaaggaatctaagataactgatggtgctctcttccttttaccattcttatctaatttatgttcattaagcggtacgttattaacagaaactaaactttggtcaatcattttctctagttcgttcaaatcaactgatgtacatcttgaatgtggtctcatagttttattgttatcaacaattggtgtgttatgttcagtttcaatagttacactaggtgagcttaaattcatatttaaattacttgacaaaactttattattatttggttcttgtaaatcaacacttgaattaatcaattcattaattggtgatataaatgacattctatttgtatttctatttggattgtattcttgtgttaatgcattacgaagatttctaccaggttgtgaaacttgatttgcatttaacaataaattatttgacgatgaggtagatggtgtacttgaatgtgtatatgctgaaacgtcatttgaatttggtgtattattaaatgttgagtatggtgaatttaatccactcgtatttcttttttcttcaaaaaatttagtatcataactcatgaagcttgaattattatcattaaaacctaacttaatatcacctaatggaccattataataatcttcatcaaacttagtgacatattttgcatctttacgatttttcatccagaaaaacaaccttgcaattataacaattatgaaaaccgatattattatactaccaactgaaataaagactgtacccctgacattttcgcagtgaagaataaatggatcttggtaaactggaactccagctgtgtatgtaccgttatatgatgatgttgatgataatgttgatgatgctctcattgaattcgttatagagctagaagttgtaatcgcactttctttcaacgttgtatgtgttgatctgatagtttgggctagagttgttttacttgacattgtggaatttggatggtgtaaaggaatgctagttaatgaaaaattattttaatgaatgaaatgattatacctttaaagaatggaaaggatttacttgttcaatgctggagaaagaagtttcgttttcaggtgatgaattttctttcaatatattagaaatacttccttcttaacgaactaaaggaaaattgctaaaagattctttctaatcgttaaagtattaatttacttaaagtagttatattacaatagatacacgtatttttagttaagaaataattttcgaaaggtaaatacacaaaacgcggttttcgtgttttctacaaatacaaacacataatcgcgtagggggtgcctttcttttttacctttatccttactcaattctaattctctagaacttccaatctgcatctgcagattcaattgcccatgcaaatttctctcttaacgttttagtgaacaatttttcaattggaacattgaatttctttgcaaacatcactgtaagacgtggatcaatataattcattttggaagtacctaatgaaacagtagagttttcttccttatcctttaattgtaaactggtattcttaattctttcttcaagtttatcaatttgagctttcagcttttcagctgtataagtggatttttcttcatatttttgcttcttagcttcacttttatattgcttgatcaattctttagcactttctaattttttcttatgatcttccttgatctccatagatttaactttataatcttcaggcgaaagttctttcttttcaaatttaagcttttccttatccttttcaaatttcttgctaattctatcaagttctttctgtgaccatctctccacaatttccaattctttctcttttgttaaatcatctatttcttcaaaatattctaattctttctttttcatagttttatcaagttgtaacattattctctttaatttaatcttttgccaaatcatttcttcaattttttcattaattttttgaacacccgcttgatgagcttttggaattgtacgttgatggttacataaaattgcaacttctctattagctgcattaaatgcaacaactttttcattaactgtaccctcatttggtatcaaatcaatttgatcttgcatagttttagatgcattataagttctgaaaacttttgctgttaatccaggcataaattcttggaaatatttattcaaaattgatggatctaatctatcaaataaatcatctcctggctttttaggatcttttttgaaaatcttcaaatttttgaaaacttgtgtatcaacttgaacttcttgataaaatctaatagaatctttacctaagaaatcaaaaataacagttgaaggtggtttaagaaaaatatgctcaaatcttaatgaacaacaaccaacagtatctgcttcatcatcacgcttttcaccaccagctcttaatgcaaaaacatcaatcaaataagtcgcagttgcaatttgtctatcaatcatcagtgaactttttagctttgatctataatcatttctaattttatcaacatgttttttcaattctctagccttttcaaattttttaaaatctgacatacctttgaatgatgaattttgtgaaaatctaacatatttaacactacccataatattttctttccacattgctaaccaagtgactgtattatcatgtttaatatccccccattgatgaccagctggtggtggtggaattggagcatctttacctaaattcagtgtaatactttcaggataaactcttctctttaaagtacctgttttaggatgagcaccacgcccacgaaataaacctggtggttcaatacgaaaattaccaacttgttccttacggccatttaagagacagaacttgtatttttcttcactagcttctttttcctcctttattttcttcttttcctttggtggtaatgctttcttttcttctcttagtttgtcaaaatgttgaaagatttttgaaaaatcacatttagaaaattcttgaatgtcagcatcaggacatccaccagattcttgtaaaacttctttgaaatctctaaagaagtttttctgaaatgtagggtttttggcatgatctgattccaataacgcaccaaaaaaccctgcaacttcttcagcttcttttggtagtgtaactggtttaccatcatagtataatttgacattttttggtaatggttcatattctggtggaaataaaacaccgttatgttctaaagtttcccatttaacttcaccatccatatcatcagtattctcccaccatttaaaagtatcatcgttttcatcatcagaattggatgaatcatcatctttaacttcttccttaacttcatctttgatttctttcttaacaccgttctttgagggttttttggagtctttttccttttttattttctttgttggtgaagtttctgacttaatttttctttttttagttgaatctacaacttgtttctcctttttcacaactgtttccgtcataattatataagtactgactaattgatcttagacataaaacccaaagaaaacaaataaaaatattttcgttaaaattaaatttcaaaaaattagtttatgtcatctaagaactgtatacaatcgatacactaaaatttattcaagttgaaaaaaaaaatcaccaaaagtaatggagacgccagaaaagacgcgaaaattgcgagaaattaagtggtgagtgaatgaaaattgcgagaaagaagcaaataaaaaatagaacagttggaggctcagctttataaaaagctaaagttaatatatgggcttctttaatgcaagtataactctcttccaatggggataatgtgaaatattttggggtagtgattccaaagttgacaataccatttttgtataagtacaatatatacacatacagtttttaccagagtatagtgttaattaatgtatacaaggtcagacagtaaccctgaaagtttaaatttttacaaaaataaaagtaatcttaacagtgtaatgtgacgagtaacaagattcgcaactatttttataaacgttttaatttttcaattagctctatagacaaatgaataccgttatctgaaagtaatacgtagtcggacatttgatgtattattcaaacgtaatgttatgagatatggtaacagtgtttacgtaaaaaattctttatcgtattgttttacgtgttttaaattaaactttatttagttagcagtcgccagagatgacatcagaaagcgtttattgtataatattttgattgattagggtgtgtgttacataattgtaaacagatcaaaatattaaataataaaaattaccgaaaagggacaaactgtcaacaaaaaatcaaaacattaaaatttccaaatgcggtctacatttttgaaatgtaaacaagaatcctgatggggaaattaatctttcttcaattttgttcaaagtggtaaaaggaaaacagctggaactatacttcatctgatatatcactttcttaggtttgaagaactaactctaaaacttgtttcaagacctttttatcttctacttcttcccactttttattatcaaaatcttctttcttgaattattgtgacattcatttcctattttatttgaactttatttttatttcttttttatttgaaaagcatcttgaacatttctttagtcaatcgaatattaaattcttattaatattcagcaacaaaatagttatatcattcaagagtaattcatggaaagaaaatattattaattttgaagcatagcatacatattataaatacacatcagacagaatttacaacataaaaagttagaaatatcacatagaattgacaattaattatccatatatatttgcataaaaatctaaaaactaatatgagttcaaaaagacctttacaaccgctaaatgatgttcaattgaataaggcaaatattcaatctccaaccacagttaaaactcctataaaaggtgcaatctctaaaccagatgcgggtaaaaagaagaaaagagagaagttaagttctctatgtaagacaccaccaagtatagttaaaaatagacatggtagaggatacagaagaggacatttcttaggtgaaggtggttttgcacgttgtttccaaatgaaagatgatactggtcgtacatttgctgctaaaactgttgcaaaggcatcaattaaaaatgaaaagaccaaaactaaacttttaagtgaaattaagattcataaaagtatgtcccatccaaacattgttgaatttatcgattgttttgaagatgatgttaatgtctacattttacttgaaatttgtcctcatcaatctttaatggaattattaaaaactagaaagatcataactgaagcagaagctagatttttcatggttcaagtaattggagctgtcaaatatttacacagaagaaaagttgttcatagagatttaaagttaggtaatatcttctttgatcctcatatgaatttgaaaattggtgatttcggtttagcaactattattaattcagctcatcctagaagatatactatttgtggtaccccaaattatattgcacctgaagttttaggtggtaaagatgttggacatggatttgaagttgatatttgggcaattggtattatgttatatgctatgttgttcggtaaaccaccatttcaatctaaagatgttcaagttatttatgagagaattaagaataatgattataaatttccacctgattctcttgtttcattagaagcaagacaattaattagagatatgttatctactgatccatatcaaagaccatcaatggatcaagttttggaatatgactggtttaaatgtggatcattcccatcacatattacaactgaatcattgaaacaaaaaccaaagaatttggctttcattactaaagaggaatctatgattaattttgcaaattgtaaacaacaagttggtattaatgatgttccaaagcatccagttgaaattttaagaacagatcttgaaagtgaacgtcctagaactttattaccacattcattatcaccagataatactaaaaacaaatataaggaagtttctcctgttaatatcaaaccatataaatctaagatttcaaatcaactatcgaaagcaagttatgataataaaatggtttatatgctgagtgaatcattatcagcaactttagaaaatataaaattaattgaaacaggacaactacaaccagatcctaaattagtacaaaaacctcaactggtcagtaaatgggttgattattcaaataaacatgggtttgcatatcaattatcaaccaattctattggtgttttgttcactgaaggtcatacagttttgaaattccaggatagaagcgatatattcttaattcatcctaatgaggaaactggatggaaagttgatcatttccaaagagaacaaattccaaaagatttatcaaatgaaatgcaagttatagaattttttgataaatatatgacagcacatttatcagatgtctcaagtggtgaaaaacatgatcaaaatggtggtgtattcttaagaagatatacccgtgatgataatggtataatgtttgaattaagtaatggtagttatcaatttaattttaaagatcatcataaaatagttttaagtgaatatggtcactatattacacatatcacaccaaataaggaaattgaaacattaccattagactatgttctgaaaaatggtaactttttcgaaactccagatgattatttcacagtcaaatataatttcatgaaacatgttttaagagaaaaaatttcaatataaaatatttcttttatgcatgtaatttcatagatacatcaaacttaaatcaaaagtatgaataaattacataaagcaaaataatttattcattgatacctattacttttcaccaaatttatgatgttgtacatttttgatcaatactgttttttcacattttactactttaattgttgttactttcgttttttttttgttattattaatctaagcttatcccattcctctccgttttttattttagttcagttagaaaagaataattaaatgattcattctgaactttttttatgctttgaaccaatttagttttaaaaaatttaatttataatcgttatagataatattgtgtttgacatacaaaattcaaaatcaatatagtaaattttagagttatcaaatttcattttattttagattattttactagtatacagatttagagaaaagtgtaatataaatttttatattttgctatgacaatgagattaaattataggatcattttcagaagctgttaaaatagcttttaatttccattctcctcttgaatttttcatttaaaacagtaattttttgaattaaactattacaagcatttcttaaagcagttcttggattgtaaccttcctcagtttgaagtctcatcatgaaattagcaaacaatggatgttcaattttataagcagcaaataggacttttggatcattaattaattcttctcttaacaaattacctaaagtatgatcttctctttcaaatttaattaaaatacaatttggaactttagaatctggagttatttgaagcttaggtactccatctggtaaaataaataattcaaaacgatctggtgcgttcattcttacctaataagtgattgatttagtacttaagtgtagattaattgtagataaattggggattctgtaagacaattatttcgtcatgtctcagataccaaaattcatgctaagctcttctcagatctatctgtcaattttttgattttcaaaacagcggtcgataagtcgcttgttttatatgcggtcggtgcgtcgaaaaagatcaaaaagaaaaaaattgaaataagagtaaaggcggctcaatttataagttacgtaattggaattgcaaattcgtgaaaatttagtgttattttcctgttctgaggtattactatgagtgagaattgagtgattgtctaaaaaataaagggaaatcgatggttggtttactttaaatctctttctgggtttcttcccctttttatctattttattatccactggattgtttatctttgcaattgcactcataccagtgtatttatcttttcaacagacttattacatttatttaatattccattttattgaatatatattatttatccccccataataatctctttctgcgtttttttattgaacaaggctcattaattttattgaactgtctctttacaacaacaactgttacaatagtttaactgaaccaatatagaacaatttattaattttgtttcccttgtttttcattagttatgtctgcttggaatcaaaataacacccaggaaaaatcggaagatccgatttctgctgattcaaattcaacaaatcaacagaacagtactaattttgatagatctgtctctgttgctaattctgttcctgattcatcaataatgtctgctccaattacgacctctttaactaatacattaacttcatcaactgcaccaaattttaatgataatgaaaaaaatggttgcctcaacaacaattaatggctcaaatgaaagtattaatggtttggtaaagactgaaagtcaagatactgttgttaaacctttatcagcatcttcaacaccagctgtggaaactacttacaattctacaccatctattcaacagcaacaacaacaacaaccacatcatcatccgacagttttacctcctccacctccttcctcaataaataatggtcaacatcataattatcaattccctgcattgtctaatttaaacacattaccaagatacaattttcaaccttctaataataatgtgaagcatacacctttaccttcttttgacagtatctccaaaagtacaaatcaagaaaatattaaattaccccctgccgatcgattattaaattccccacccaagacaattgctgaaacatcaactaataatgttgcttcaccacaaatgtcccaaaatggaacatcagaaagtgttgcagataataataatagtgccccagtttcagaaaaaccttcgggttccgaatcaacagagttcaattcatcttataaaccactcaacgtgaaagatgcactctattatttagatcaagttaagcttcaatttagagatcaaacagatgtttacaacaatttccttgatattatgaaagatttcaaatcacaaaagtaagttttcttttcaacaaatttttctccatttgaattaccatactaacattttattaatttttattattacagtattgatactcctggtgttattgaaagagtctcatctttgtttaaaggacatcctaagttgattgatggctttaatacatttttgccacaaggattctctattaaatgctctccttctgattttaatactattatagttacaactccaatgggcacatctataagaagagattctgcaactttagagtctgcaactgaaaatactagagctgattctcaagatcttaattcagcagaatccaacaaaaatcaatcatctgctgaatatccacaacaacaaagactaccaccagtttcatcatttgcacaacaacagtcttcagtacaaaacaattcacaaagtcatgtacaagtccaaaatcaggaacaacaaactgaaactaaacaaagtactccggctgaatttgatcaagctatcaactatgttaacaagattaaacaaagatatgctactcagccagatatttacaagttattccttgaaaatcttcaaatgtatcaaaaaggtttgaaaccgatcaatgaagtttacagagaaatttctattcttttcaaagaggcgcctgatttattagaagatttcaaattgttcatgcctgagaacactgttgttaaagatttaaaacaaccagaatatgcatatccacaatattataatcaaaatgttcaattacctccagttggtagtttccagtcaaatgcaacacattttgcaaatggtcaagctgatggtcaacaacaatcaatgatggttaatcaacaacaatactctttacctccacctcaacaaattgcagttgatgatcctcatatgaatcaatatgcataccagcaacaacagcaacagttacaacaagtacaaccacaatatcaacaacaatatcaagcagatgatcattcatttggtaaagataaaaaaaagaaaggttctgttgctagtgttagccaaattcaaacatatcaaaaacagggtcaattacaacctcaagatgaattccctgtttctaatttgagaggtagtatctctgaaaaaccatcattaatttctggtgttttggaacccgtttatcctaaaactttggatactgatttaacaaatgaaattgcattttttgataaagttaagaaatcaattggtaataaacaaacatataatgaattcctaaaattactgaaattatactcaagtgatgttgttgataaggaaacactttaccaaaaatcacgaagtttgattggtgaattccctgaactttttgaatggtttaaaaactttattggttgggaagaatccccattaagaattgaagatattgccattaaaaagcagcaaattgatttattaatgtgtaaagctgctggtccatcatatagacaattaccaaaatcacaaaccaaaatgccatgttctggtagagatgatctttgttggtcaatattcaatgatgaatgggttggacatcctgtttgggcttctgaagaatctggttttattgctcatcgtaaaaatcagtatgaagaaatgttattcagaattgaagatgaaagacatgaatatgattattacatggaagcaaatttaagaacaattcaaactttagaaactattgctaacagaattgcaacaatgacacctgaagaaaaggctgaatttaaattacctgttggtctaggacacacttcaagtaccatttatgttaaagttattagaaaaatttatgacaaagatagaggttgggaagttattgatgcattacactgaaaatcccgttgttgccgttcctattgttttgaaaagattgaagcaaaaggatgaagagtggaaaagagttcatagagaatggaacaaggtttggagagaagccgaacaaaaattaatgatcaaatcattagatcatttaggtttatcgtttaaaaatattgacaagaaacttctaaccaataagcaacttgttagtgaaatttcaactattaaacaggaacaagtaaacaaaaagttacatccactgatgacaagacctaaatctgaattgataactaagtatgaagattttactatctttatggatattctgaaattaatcaataccaatatgaaacataatcaactgtattcacaaaatgataaagaaagaatggaatcattcatgagatcattcatgatcaaatttttcttcatggatccaacatttattgaaaatgaattaaaggatagaggtattgcttcaatcgaagaaattgagaatgctttagaaaataacgatcatgaagaaacatctaacaaagttaatttccctactttatcgcaaactaaaaaaagaccaagagattatgatttattaaaagatgttttaagaagaaataagagaaagaagaatgatttacagaatcaagcagctactcaaagtgaagcttcagctgataataacacttcaaattcacatgctgaaggtgatgatgaaccaatatcagaagaattacaaaaagcacaatcaagttggatttcaaatgacattatcgattctaagactggtgaagtaagagatgaatacaacatgttcgcaaatacccaaatttatgttttttacagacatttagatactctttataagagacttctggaagttaaaaaattaagtccagaagctaataaagagatcaaatcaagaaaagaaactaagtttgcacaagatttgggtctgattgatcatcatttagaagaagttggactcgcaattaagggtgatgattcatatgctgaagctcttaatttatgtgataaattgattgatggtaagattgaacaaaatacatttgaagaagctttacgtaatggttttagaaataaggcatttaagattttcactattgatagagttattcaaagtttaatgaaacattgtcatactatagtttctgactctaaatgtagtgaaattttaatgttaatggaaaaagatcataatcaaacaactactactgctaaggatcaaattttgtacagagttcaagttagaagcttcatgaatcaagatgaaaatatgttcaaaatcacttataatagagcaacaaaatctactgtaattacattcttagcacttgatgatttaaccataaaggatgaaagtgatactgctgaaagtaaatggaaatattatttaactagctattctatggcacatccaactgaaggtttagatagctctaaaatcagactaccattcctcaaagttcaattagaaaatgaagaaagcgatcaaaatgaaattgaaggtattgttgattcaaaattatcggttaaaattgatatggacacttatagaatgagatttgagcctgaatcatatgatttgttcatcagaaactcgttatatactaaaccgccaactagtgaaaagaacaaatcaattagaatcaataaattgaatgatgttataaatggcgattatggaattgcaggtgatttgaaagatggcttgttagaacgtgctaatgaaaaattatctatcctaaaggaaaaaggcccagaagaatatcttgcatttagtctaaatcctgaatcggaggaaactaaggatgaccctaaggatgagaaagatgacgttatggaagacgaaactaaagaaaaggataatgaaaccattacaaaggatgataaatctgaggaatttgttgcaacgaagaatgagaaaagtaaagatgaagatcagcaagagtctgaacctgttaaggttattgaaggtaataccataactaaggaagcgattccagctgatgtaactattatggaaggtgattcaactattcaacaagacgaaactgttgagagagttgatgtataatcatagcaaattgtcaaatatctagtgtacttttttcagtccaatattatggactcttatatattgtttttactacttcttttgaagtattttgtttttaatattaatattttgtattttataaaaaattatctattttgatttacttaattcataatcttcggtctctaaatctacaccaaagtcgtccaacgtttcacccataaaatttgaccaacttttcactgtcttctcattataatcgtcgatggtatcctcgtttaccgcatgaacatcgatgaaatctgctgggtcagaatttgatccatctggaggaaatggtaagttcaattgatcctccttcagcttatctttaacaaaaacagttccatcgccactcgcatgtccaaatgggtacatccaaaggtaaatagggcctaaagaatctaccaaattttcataagatgaccctaaatcatatgggaatactaaatcttcataagtgaaattccaaggtatctttgtatttttctttaactctctataatttactttccaggtcttcaaattgggtattggatctggtttatccggatataattttgaataatttgaacgtacgtcctcccaaaacttttcagtaaagaaattatcttgaatcctttcacattcccattgttctatcattgtttgattggatataattgaagcaacacatctgataaataaaatagaaattgttaataaaacaaacgatatgagtaatatattgataataaatatggttaaaaacgatgttgaaatgaaatatgatggcaaatttctgatttgaattaacttccagattcttccacagaagtagataaaaccatatgtaattgtaactaaaatccatactagaaatctcataaaatgaggtaagttatgataaccaatgcaattgtttgtccatggacagtgatgatccattcttaagatacattttccacattttttacaatgatgtgtacgttcaggcttatagttcttgcacttcacgcaatacttcctccacattgtttgcggttgcttaaattcactatcgggtagtttgaagtcatctttaggagatcctgctggtgtaactatagctagatagtaagaaatccaaagcattatatttgaaaattggaaaaataaaaaccatcttgacttaaggttaattgggtcattgaatataacgtacgttgttgatatctgtagatacaatatgattatggagggtattgcaatacccatccatggatgtttgaatgttactggcattgcttttcttgatatccagggatcaagttgatgtattgatattgaagatctttaagatttaatataaattcttgcatggactgaaaaattgaagtgtgggttctacattagactatgcctggaactactatatcatcgttaatcttcagtagaagcttcatatttggcgactggagttattatttagcttattagaatactacttaacgtatatatatatatatatatatataatactacatttaatattgattcaaatcaaatcaaatcaaatcaaagcatcagacttcgatttctttttagtacgacgtaaaacatctctacgaagtcttctgaattctctatttaattcacctctatttttccagaaccaatcatcatattctaattcttcattgactctaacttctctaaatttattgatttgtgcttgagcaatcaagaaaggagaattaaaatgagaaaagaataaaccaatatttctggtctttctgactggtaaaatagcattggtatcttcttcttcttcttccattttctcatcatcgagcaatgacagtttagtaggtgtagtgctgctcaataaatctctaagtttctctgttgtgtttttagaagcatctgcgtcattagctgttgaatgaaccaaaagttggaataaattcttcttcttctgcttcttcatctccacctgtttgatcattgttctctagttcttgttgtggttcgtcaattatgatttcattatcttgtggtgctttcttgtactgtcgtcagtgaccgagatatcgtttatttgttttagttcgtctgatgcttcttcttcattagtgttttgaggttttatgtttttgtaaaattcatcatcatcctcttcatcatcaaaagtgacaactttggcatgcttttgatattcttcaataattgactgtcgtgaaggatgtaaacaattggtttctggtacgttgtattcaatttccatttcatcgtcacttttttcattttcaatatgctgaatttcgtaatcaaatcctttatcatctttgctatctttgttatcatcttcatcttcattgatttcaatcggtttggagaaatcatatttacttaacatttgattcaacaattggtttgtcttattatgttcttcattaatttcttcgtcaacttcagttttttcaattggttcatcatcaacatgaacaccattgttatcgaaaactaaaactttacctgtgaatctttcaataacatgatcattaccatctctccattcaccggcaacaaaacgatatgtgaaatctttaatatttttattcttatcaacaccccataacttgttctttttacatttaattacctttaatctaccattaattttaactctgattgttaaattctttaaatcagtttttcttggtgtttttctcattcttcccttaacaactaatgcagcttgaaatgggttcatatttttatttgctattctttctaatctttcatctgctagatgttgcctttgttttctttgtaagatttttttatcttgtctccttgaatctttttcccatgcagatttgtaatcttccttagcttttgtaattgtaagttttgaacctttgaatctaacgccatcccataactttttaagtttgatatattcacttttggatatttgcattgtaatatatgcaaaatggtattctaaggacgggtttttcgtgaacttcaaatgaatcaactattttaccaactttaccaaatctggtttcaagatcagcaatatctctaaccaaatcttttgaaaggccaccaacgtgaatacgaacttttcttctcttttcttcctctaccatactaccaaatatccagttagctctctaattatcaacctagtctatgtacaatctataccttaaatattgttaagctataacattaaattatcctccttaaagctaaggaaacaaaaaaattttattttatcctaaaagggtaatttctagtgcacggatggtatgatttttcatgaagtcactttgaggatgctataatattgaaatgtaatatcaattcgactgtgttgactgagtttataagtatctagagattattactgcttgtttggataagtagttcaataaacaaccgtttgatactctctacaatggcatctcagaagactgaaacaagtgtggtgatcgccgatgaggaagaaattgttttgaatatcgattactatcttgatcaattatcagattcaaagttaagagatcaattcacaagtacaacaatatctattccattgaaggttgaaggtgaagaagttgctattgatactttgaacgatttacctgatgatccaaatgaattatgctctcttctaagtactgaagaatgtatatccaaatactggattttagtttcaaaagcttacgctaatcaaggtaaaattgatgatgcattaacagttatatcacaagcattacaaaatccatttattatttcatctggtaaaaaggaatattctgaacttaataattttgctgcttggttaaatatacttaaagcagatttattcaacgattcaacttcatttgaacttgctaaatctgaacttaacgcagcttcatctactttaactggttccgaggataatgaatataatgttttagcagaagctgtcttatctttatctacgaagaaaaatagaggtcgaagaaccaagtttgacacagaatcaaggaatttcgatatgttactgcaaaagaatccaaagaattgttatgctttattaggaaagggtaaattattcttttatagacaaaattatattaatgctttaagattatttcaaaaagttttacaattgaacccacttttaagacctgatccaagaattggtattggtttatgttattggtttttagatagaaaagacttagcaactcaagcttggcaaaattcaattcaagttaatcatgacaacaatttagaagccaaaatcttgatttcaattgctaaatttgatgattgtttcctaaattccacatctgatgaagattttaaagctaaatatactgaagctatgtcattcactcaagcatcttataaggaaagtccaggaaatgaagtcattcaaattatcctagcatcctatttttttgctaaaggtgatatcaaagtagttgaaaatatctgtggtaaaatttttgatgataaagcatcaaccaattttgttaagagtgaagcgctgttttggttagctagatgtaaattagcttctggtgatgttttacaagcacaaaagagtttctctgactcgattaaattaaatgataataatgtcttagcaagaattggttattcacaatgtttagttattagaggtgaaatcaatgatgctattagaattttagaaaaaatccatgaatcaaactttaaaattttagaagtcacttatgcattaggtatgttatattcaaagatagaaaaatctaagaaaaagtccattgaatatttagaaaagtatgttaaagttgcagaggatcaaaatgaaccagtttcaactgcttcatggataacattagctaaactttatgaagaaattgatatctctaaatctttagaatattcaatcaaggcaaaggatgaagaaattgcagctggtaaatctgatgaagaaatttcagcaatcttgtttaataatattggtgttttcacactattagagaatcacccatctggagctgaagaatattttgaaaaagcttataaaaatgtcaaatctcaatatgctgatgatgaaaaagctgaagaggctttagaaataacacttaaatataatattgctagagcaaaggaacaatctaatgattttacaaaattaaaggatgcacaaaaaatgtataatgatattcttgaaaaatgtccacattacacaaatgctaagatcagatggttaactattgcatgtttaactgaagataagaatgtaaaagaagaagttgaacaacttttgaatcaagaatctgacgatatggaagttagatcattttatggttggtatttaagtagatttggaaaaaaacatggtgttgaaaaaccaaaagatttagaatcagatcatcataaagaaactgttactaaatatgattcacacgattgttatgcattattgtcattagctaatgtctattgtacacttgcaagagaaattaaagatcaaaagaaaaaagatcaatattatatacgtgcaactcaactttatcaaaaggttttaacattagattctaagaatgcatatgctgcacaaggtattgcaattatatttgcggaagaaaagcaaactgcattagcattagaaatttttagaaaagttagagattcattaaacgatattacagtttatttaaatatgggacattgtttattagaagttaaacaatttgctaaggccattgaatgttatgatttagcattaactagatttactgatggtaaagatgcaagattattaaattattttgcaagagcgtggttatttagagcaattcatgaacgaaatcttgattatttccaaaaagctttaacatatgttaacaaatcttttgaattaaatccaattccatcatatcaatttaatattacatttattgaatatcagcttgcagattttataagaaagctaacaccagcaaagagaaatatggaagaccttgagaaatcaattaaaggtttagaagattctattgttattttaaattcaatgacagaagactcaaatattcatgcaccatatccaatagaagatttgaaaatgagagtaatgatgggtaaatcattattaaaacaattagaaaaagcacttgatgaacaaaaagaatatgaaaatacattccaaactaaattaaaggaagcaaagaaattaaaggaagaacaagagagacaaaaggaagaagaaagattaattgaagaagaaaaacgtaaaaaagttgaagaaaaacttcttgctgaaagaaaggaacttgaacagcaacaagcagaatggaatcttcttagaatggaagaagaaaaggacaatcaagatatgttggataaggatcctgaacctaaagaaaagaaaaagagaggtagaaagaagaaagaagatagtaatggagaagaaaaatcatcaaagaaaagaaagactactaaagttgcacaaaagaaaagctcattatcaaaagaattcattgatgatagtgatgatgaagcagaattcagtgaagggtatgacgataataatgatgatgtatgatatgatgatgatgatgataacgttgaaggtgatgacaacgataatgattcggattctaaagaatctaatgcagaaacaggaaatgttgaaagaaagaaagctgcaatatctgatgatgaagaagatgatgataatgaaggtgataacaatcaagacgataatgtttccaaaccaaaaattgttgatgatgaagaagaggatgatgatggattattttaaaataataaagtcatctaatctgtttaatatgctatttcataaactatttgtatcatattactatattactatattatataacttatataatttacacgattgttaaaaagattgtgtaagaactgcaaccaatttgtatttttaaaactagatcataaaagaagtctctaaaaaacaataacattcacaatcatatattataataaagtataatacagtatagatcgtataaatactcatctttcaaatttctttgatcttttatcgtgaatttctttcttcttatttgaaacttcggtttcattagcattaaaactgatatttgtttcttggttgaaaggattttcaggacttttttgaaattctttataaattaattgttccatttgttgttttcttaaacctggatgttctttcttaatttcaggtaatcttctttcagtatattctgctaatgcagctttaaatcttctttctggatgtctatctaaatctttatttgaaactgcactaccctttaataaagttaaagcagctaaggaatcatctaaaccatcggcactaatagtagtttttggagtaaattgattgagtgcatcatctaaaccattgccctttttatgactcttagttttaccacctcttttagatttaattgaagattcttccatttcaagtaacgcttcacgttctttctttttgtctaattgttcttgtttctttgcagcttgttcaagttgtttctttgaaggtttctttgcaccatcatcccaatcagaatcagaatcgacttgtgctactggctctgtatttcccttctttcctttctttgccattgtttgtgtttggttaaaaaagaaggcaaaataatcaagtgacgtgaaaattggccattgatcatgacgattcctgtcattttattgaataataaattttcggtggcggcgcagcagatttacatagcaacttatgtattatatcggttgtaagagacatagtttatgtacaggagaaaatagagtagcaaagactgatttaataaagaataatgtaatgtggatcaatgtacagaagagtaaaatagaatagaagaaaactatatacgtttataaccatcatcgagtctcatagttaaatgttctaatgcagttaatggattaccattcttatctaaggaatagcaattaccgttataattctttactattttagaattaacaggtgataatatactttcatctgaaggatgacaaaagaataccacagaataacgttcatttttagttctaaccctatgtaaaatacttttcaaataaccatcagtccaaaagcttaaaacatcagatatattaacgataagatattcatctaaattatcagattcaggtattttaatttcaatccatttttcaccatcaaatacttctaaacctaaacttggtctttgtaagatgaatgtcattgaaccataatctgtatgagcaccagctaaaactttatcagtttcatttgaatcgattgaatcaattgaatcaattgaatcaattgcattataatgtacgaatcttaaagttgaatgagttttcaaatctaaagcatgagctgatacaaaatattcatgatctggattaccattattatctcgtatatctaaagcaattgctaacattctacaaatcatatgtaacataacataatattttcttaaagtggaagatataaatggcatatttttttgaaatattaatggtaatggttgatttggataaaaatttgataaattaaaatgagttatattaaaagcttccttatcatcaccttcacctgtaccatcttcttgtaaatcttcaacaaaaggagcaacataacctgcattatttgtagttattgggagttcatttttaatttcagttggttgatcaaagaattgttttgaaatttcaaatagtttatcaatttcagtttcttcaagtaaatgatttttcaataataaaaatccatgttgagatgcagcttctaataaagttttacaattactttttgaagaatctgcaagatctataattggtaaattaaaatttgtcattataatcgtatatatgccagaaattagaaggtgaaaaaaaatgagttaatttacgttattatgtgatgaatattataatatgtatggatagctggctgatagaagaaaaatgggctgtaaatgatatgtattgccaattggggggtatacgatataatactttacagtatggtaaatatagtatacaattgcagttagtagaaaatagctaaatattacaaagcaatagccgtttcattaatgttttaagtaaaaaaaaatttcaagaataaaatgaaaggagatgatgatgaagaaagtaagtaatcaaaaataaaattaaataattttttcaataatgaaattgaataatttctatattagtgttaaggttttgtctaacagtaatatatttaataacttagttttcaaagggaaaacaagttgtttaattaccgtgtgtgaattgtaatcgtatatatctctaatgttatcactttaattgagatatataatcacactttcaacacttatggaagtatgctttatttttagtaccgcaatttatttaaactatttttaaatttgaataaaattacttgatatgatctagaattatgtttaagctactgtactacctgctattatgttattactgatttctagtttacgatgtaaaatatatgtctcgatacgctgagtaaaagatacgacgtcaaagataatcacaggatatatagtacaatagaaacggttacagtctatgcaggtaagttgcattaaattaacaatataataatcaaaattgttttgtattgctttgtattgttgtataatataggtccagagtcaatttttcaatttaaattaatgataatattatgatgtgggataataaatagccggggtatttgttatcagcttccgctttctttccggtatcaaataaattgccgatggtttcgatttcttgttgggggtgttttcaaaacttaaaatgatctttaccactgggctatgaaagtgaaaaatttgcgcgataaaaatggatggttctatgtagtgcaaaaaataggtcacgtgatctgcagtttttaaaaaatatattaaatattttataaatgatgaagacaaattgtgaaaattaaaaatattttaaaaactgcaattaagttaaaaataattaacattaaacagtgtttattttagcacataggcactcagtaagcactttgaaatactaagttaaaaagcatacagtttggaatttatttacaggattttatatactctatagaactgtgtacatgtaagattttatacattttacttatatcaatattattaaactcataatgactcacttgttaacaatattgaaccttccattaaatcaatatccttaataattgcatcatcaattatatcaccaatttctaaattcttagttttagccttactttcatcaacattagccttattatcacttaatgcataccaactagtctctaaaatacatctaacaccataatctaacattataacttcaatcaatccactttcacttggttttttagttataattgctttaaatttatttttggatttatccttttgagtctcttgtaaatattttagggctttgaaagtataaaatgctgtaactttatttgaaactttgttattaatttcatctttatattttaaatgtaatgaaagataattaatattttcttgtgaaaacattggtttaccttcattaatatatgaatgtaattgccaatgattaatcaaatcccaaaatcttcttaatggtgatgtaacagttgcataattttcaatattcaaaaattcatgtttagccgggaatggtgatatagttgatttagttaaatattcttgatataatgtaatttctttgaaacttgagttcttcttatgtgttatcttatttgcaaattctgaaacaatttctgatttttcaagtggtacttgaattttataaattgcaggtatattattcttcttgaaaaattcacctgcaatactatttgccataaccataatttcagaaactaactgttctgatcttgcacctgtttcaaatgcatcttgaactgtatcatcattatacaaatctttgaaagttagttgaatttgtttattatcagtttcagtaatattttcaatttctttcttaacattaacttcatcaaataatgaaacacgtccaccatcaactgctttaatattcaatgattgtgaaattgaacttaagttttttaaatcctccttaatattatcaatgttaatacctagtgaatcatcacatttagtatttatcaatctattagattcatcagattggagattagttaaaactttattaactgatttataatcaattttaacaaatttatttgcaagaccaaatgaaattgtttcgttatcttctaatggtattactttacaatcctttgtattgtatttgaatgaaattttcaaaactcttgttttattatctgaataacctaattgaatttttttaccaaattcaacaggtaataaaggtattgcatttgtacctgataaatctggtaaatatagagttaaacctctttcaaatgcaatttgtgaagtcaaattattaatatttaaatatgatgaaggatctgcaacaaatgtacttataataaattcattttcattaatttttttaattgagacaccatcatcaatttctaatggattttcagaatcaatacaatatattatatcatcaaattctaatcttttattcttttcaatatcattattcaaattaatataatgttctaaattatcagcagttattgaatcataatatgattgttcataatcacatttaactgaaactccactaaatggaatcattgaattatcccaccatttaactggaccttctgtattttgaatttcaccagtatttgataataaatcataaacgattgaattggtaatatctaaatctttataattcggtaaatttctcatgattttaataacgaaagattcaagtacactattttgaactgaacctgcacaatataattttaataattcaatgaatgttttataatatggtaaaatatgttgaattttagaagtgttgtttctagtgatagtaatattattgttagtattattatttggaagttttgaagagatatactcagctaattgtgtatataattgagtatctgctttaaaatcttgaaccattttatgaaatttaacatttctatttaatggtaatattaaaacatatgaagaagttttactaaatgaatcatgtgaatataattgattgttttttcttaaacttaaaatgaatgcataaaaattattaaaattaacatttaaatccatattagccttaccttgtaaaggtttacccaatgtgattgaatcatattgattgccgattgataattcttttgatattaaattaaataattttttatttgatttttcataattttcaggtttttgatctttaaattctttaaataacatttgtaaatcaattaattcaactgcattataaatttgataaagggttaattgaattggtgattcattactttgtaaaatgttatgtaaaaattctaatttgatattcatatttggtaataattgccaagcttgatttattatttcagtcaaaatttcagatattaaacctgataaaattgatggtaaaataaaagtttttgcagcattttcatttgaaattgatcttgcaactgcactttcaaaaattttatttctatcaataacatcctctaatttatattttggtttaccgattggtataatttcatcatcttcatttaaatcttcccaaaaaatttcttcatcatagacacaatttttaaaccaatcttttgggaaaacatttggaattcttaaacccattttagatcttgaaacaaattgtaattcaccatatgagttaaccagtgtatatcttggatcatcaattgtattcggtaattcaataacgacagctaaatcacttttttcaaaattacctgataaatcaactacatcaccaactgtaagttctgaatattgtaaatctttccaatggaaacttttattaattttaccaaattttttaattaaatgatgttttaagaattctctatttgaactatcatcattaaaagtaaattttaaaggtaaattaatatcagggaagacttcagttatccatttcttatttggtttaatatatcttagatctgttctttccttaacttcatttcttaaattatcaatatcaacatttgaagcttgcattagaagttcctcgggcgtttgaattcttttatttattggtacattatttcttttatttctatatttagtaggattacctctataatttactgtagttggatgtgaaatgtcttgaaaatgttatagaatgcgcaagtaaacatttctgctgtttagccgttaaactgaacaatgttctagatctactagccagcattatttatccttatagactatatgaaattcagatgcagtataattatatagtttaaagttattgaaaaaaaaatttgatatttcaaaatgttaaaaatcatgttgaaatagctttaaaaatttaatgttatgagagagtttcccttttaggaaggttatgcgattatacagagtctttaagctactataagttacttagaatatactatcaaggacgttactgatggtagtggatgattgtttggtcttaatattatcatcagcatcagctctgttggtagcaacatttctttgtttgaaatttcttcgtatttctttaggtttatgatcattattaatgttatcattggtactatcatcttccaatttacgtttcttactttgtttaactctattgatagttttacttgtttcaacatttttaatataagctttattaagtttatgagcttgagataattctgcttgtttcttactttcacgaacttcaacttctctattaagcgcattagttaaatcaaaccatttaaaaccttttaaatatttaacattcataacatcatcatgataaaaacttctctttttaccacctaaaatattaccatttagagtatttgcagctaattttgcattagctttatcagcaaattctatccaaccttcatcaaatttcttctttttattaccaccagatttaattcttgatttataaacttttggatcttcaggtttgaggaaaattctaccaacttcaccaaatcgactcataatttgtcttaatttttgaggtttcatatatggtggtaatgaagatagatatacaacaccagttttctttattctcctttcttccttctctaattgttttggggttaattttttaactttctttgtaccaaaagttgtactaccagttaagtttttttctaaaaatttagcagtttcactaatgtcattattatctttatcttcaagatcatcatgaagttcatcctctatatcatcatcaagatcatcaccgtcatcatcactttcattttgagatttatctagaaatgagtttgctgattttttagttgaatgtaattcattgtcaaagtcatcatcatcatcatcattactcccattgtcatcattactatcattttcatcattttcattatcactatcagtaccgaatctgtcaaattgttgtactttatttttactcaaacttaagtttttattatcagactcttcatcagaagaataaaagtctcccacatcactctccaccattgattggtatatattgatatcttaacctatgctatttacagtactatacagacattaagatagtgaaaagtttaagaaaaaaaattttaaatttaatttaatttaatttttcatattttactatgtaaaataaagaacgtgtcctaaataggcaagtgaggcgatctctctcttaataataacctttccatttacataccatttcaactgcacatgccccccaatcttcaccatgattatgcattcctggtgatattgcagctctctgtaatgcctgttcttcagtgagacatgtaagtaccccgaaaataactggtttattaatttcaaattgtaatttcattaattgtgatgaaactgcatcacaaatatattcaaaatgcattgttgaacctttaatcaaacatccaattggaattacaacatcaacattatgtttattaaacatacatttagttgcaaatggtaattcataggcacctggtacactctcaataattatattttcttccttgacattatatttctttaattgtttaattgcaccataaaccaatgcatcaataatttctctattccatctagcgtgtacaatcccaacacgaatttgtgatccatcataagtaccatctatttcacctaatcccttaactgccattctttgtcaatatttaaagaggaagaatacttaatagtacttagtaatacttagtaatagtaacagtagtagtagtttataatacacgcgaatagtacagcagtctagtattaccatcagtttcaattattatgatcatcttctaccgggtgttgatggtacgacgtgtcttttggaggattaatattagtagcaataataataataataataacagtaagagaatgaagtattacgctgtgagaaacggtcacaagtctggtgtttacaataactggtcggattgtgaaagtcaagttaaaggttattcaggtaatcaatataaatctttcaattcaagagctgaggcaaatgcttatatgaattctggtagtaatagtaatagttcaagatctagttatggatcttcaagctcaggatcaagatcaagatcatcttattcaaattcaagttcaagttcaagttctagggcaccttactcaaactcatcttcaagatcatcatatggttcatcaaactcctcttcatcatcatcatatggttcttcaagatcatcatatggttcttcatattcctcatcaagctcatacactccatcatactagttcaagttctagttcatcatcatcatcatcatcatcatctagaacagttaatatttacactgatggtgcatcaaaaaataatcaaggtgctaaacaaggtaaatcgaactgcaggttttggtgtttattatggacctggtgatagtagaaattacagtggtcgtgttactggtgaacaaactaataatcgtggtgaattatatggtattcataaagctttaaaaaattctgttgaagaatcaaaatcatcttctaatacaaaatattttattcatacagattctcaatattctaaagatgcaattactaaatggggtaatagttgggaaaagaatggttggaaaacttcaactggttcagatgttataaatcaagatgttatcaaagaatgtagagatatggttagaaccttaaaatctaaaaatgtcgatgttgaaatcgttaaagttaaaggtcattcaggtaatcatggtaatgatcaagctgataaactagcagttgaaggttgttcaaagtagtactcatagtatatagttattgtacatgtgtgcttactttacacaatataccgtccatcaatcatcaacgtgataacatgacgcgtctgttgccaaattctttatttacttttcaaatagatcatgcaattgattgatctttcttattttatgtcttcttttttctctcctctcctatcttatctttctcttgaacctgcttattatatgtaactaatgctagatagaaacaataaacgacaggtatgctttaatgatgcacttaatgatgatgaataatgataataactaataaacgtatgaaaattatcaataatgatgataacggtgaaattgaaaattttgcagttttaacaagtttagatgtatcaaaatataatgatattaaaataccatttaaagatgttgtcaaaattggacgttcaacttcaaaaaataatgatattaattattaaaaataatgatgtttcttcaattcattgtattttcaaaataattcaacatattgaatcaaattttatttcagtacaagatttaagttcaaatggtacttttcataacaatatcctaattggtaaaaataatagctcaatattgagaaatggtgatagattatcaattgcatcagatttacactatatagttaacttatgaaaataattttaaacctttgaaaacatcattttttgaaaaatatatcttaactgataaaatattaggtacaggtcattatgcacaagttaaagaagctaaaaatagacaatctggtattgtttgtgctgttaaaatctttaatccaacttcaaatcatacacaatcagttcaattaaatagagaacttgaaattttaattaatataaatcatcctaacattgtaggattttatgatacttttattgaaccaatatcaatcaatacttcaacaactttccttgtattggaaaaaattaatggtggtgaattatttaactagaattgttgcaaaaggtaaattaagacaaaatgaaacaaatgaaattataaatcaattattaaaaggtttacaatatttacattcaattgatatagttcatagagatttgaaaacctgaaaatatattgttatcaataacaccaactaaaattcggtcaattatcaaatgatccttgggacgaaaatgaattctccattcaagtaaaaattgcagattttggtttagctaaatttattggtaaattcaatttacaacaacattatgtggtacacctgcatatgttgcacctgaagtattggaaaattcacaaactagaaaatataataaatcagttgatatgtggtcagttggtgttttaatttatgtttgtttatgtggtttcccaccttttagtgaagagcttggtccaccttcaatgagacaacaaatttctcaagctaaatatgctttttattcaccttattgggatgaaattgatgatatagtattagatttaatcagtcgattgttagttttaaatccagatgaaagattaactgttgatgaaacaataaatcatccagtggtttacatgcaaagaaagaatcattacccattcaacatctaaatagaatacagaattcttcagggtatgattgcgaacctataacaattcaagaacgtgctaatactggactaactgatgaattgatagctctaaaatactgtaaataaacttagaaaactataatttattaaaaagaatattatatgatctaatatatatcatatatatatatatatatatacactatatacatttactttatttggtaaacgaaaaactttaccgtcttgatgaccaataaacatccatctattagatatttgatcatgtctatttgttttgattaaatttttacttcctaccattagagtatttaataattattgatgaaggattttcaatttctttaacatttaattgattagctgtgaatctaacgaatacttgctctttgtaattgtattgaattaatctgcttgaatatcttcatcattattaatattattcgagatagatggtattgatcttcttgttttaaaaataaattttaatccaaattcttcatcatattgatatactctcgtatatccatcccatgttatcaatgcaacagaacctgttttcaattcaacatcaatatccgcaattcctttatgtttaatatcatatgaaataactgatggatcaataatattaccactatacttcaaaataatcactctattaccagttgaagaaacaattatctttgaatttctctcatcaacatgaatacatgtaattggattacccaataatgtttcattaactgaatgtttcttttcgttttaccatcaatgatttcataacatacaacatgtccactttcataaccaattaaaaaacatgtatcattcaaccattttattttcataataacacctgtaacacttctaccttcaccttcaagactaaatcttacattttgtaacaatctttgcatttttttccatttttcatcttgtgataagtctagtttgtaaatatcaaaaccatcagaatcaacagttgcaggtgtaattaataattgattatttatatcaacattagtaaaatttaacatattaacaggcatttcaaattcaacttctggaattctctctccaatatcagacaatcgtttaggtaacacacaagtatatgtgaatcccacatcatttaattcaaccaatttccaaatcttaattgtaccatcctttgaatgtgttaaaattttaccaaattcattttcatcaataactgaaatcacagaattatcaatatttatcccattcaattcccagttgtttcactgtaagtatactttcatcatgccctttccaaatacctaatggtcttttagttattaaattccaccatattataatacctgattcatcagtaggttaataatgttgttgttaaaatacgatgatttttcccacaaatttcaacaaaagtatcagactggaagataaaatggttcaatgcatgttataggtgatttatgcaatcgtaactgttgtcagtaactccttttcaaaggccattttgaccatttaattcgtagaagagatcaatgaagtatagttgagttaggtgaaatattacgtaaaaaatcttctattataaaacactcatgcatgcattaatacagtttaaggttagctatataaaatgttcattcaattatggatctttatacattactttaaaatgtggaattatatctagacgggtagttccttcaggagggaatgattcattgatggatatgttattctcattttttttcaatataccagattcaactaattgtttgattattgaatttaatctatttgatgacattgaacaaacgggttttaattgttcaattgtaagggtatcaacattctcaaattgtaataaaatagaagcctgaaatatattacacttttaataaaacttttttgtcatttaaattaacattcatttcaatcatattgtaatgattgtttaatttacatattttcttatccaattcattgtaatgactaatcattgaatgtatagattgtttaatctttggtggagttttaacacgtttgttcccttggagttttatatgatgtgaatgataaactggtataattgaaacttctatattttcaatggattttttaagtaatggtcctttagaaattgctcttaatgcatctataaaaggagacaattttaaatcttgtttagaataaaaccttatagattaggtaaagatattctattttaacactcctagtttttcgattcattgccatacaattgtcagcaagcaattgtcctcatatgaatgaaaaagtttgtctaaaacttcctcatataataatggtaatagcatttggaaatatttagatacgattcctttcattgtatctaatgaaggttttatatcatcattatctataatcatcatcatgtttgaccaaaaaatttcagatgaattaagtcttaataaacaatcttcgttggtaagctttaaaacttttccaaaataatttgaataaacagttgtatttttcttattttggaatgccaaattaaatccaattaatgctgaatgttgtgcaatttgaaatatcttaccaaatcttatgaaatcgcagtatttaataataatatgaaataactctaaaataattggaaaattacctgttctacggtaaattctattattatagaaccattgggataaaaaaacagaatttaagagatcaacaaagaaaagatgataacaattattaacatttatttccttggttcccaaaactcgattagattcatttgaagtaatgtaaacttgaacaagtttttctaaattatctttaaataactccaattcatttggtttaatttcaaatttcagttttaattttactgccatcaagtttgttatcactacagaaagcattataatttgccaatgaacttaaaaactttgaaaatttcagtattatatcttgatcataagattttttgaaaataattttaactatattattgtaaatgtgaccaatacatgttaaacgatttatttgaataattatttctttgttctctgactcaataactttagttaatatttcagtcaatgcagtcaagtttactaataattgatttacttttcaaaagtatttgtaaataatatgagaaatctacctgttttggatgcaactgtagtacatttcagtaatttattactatctttatatcctccgttattagttatctcatttggtccaacaagtttaccatcaacaattttccattgatcataagacaccggattcttctcgaatgtctgtggattgaatgttaagaagctcattgctgtatgccttaaaaggaagaaaaagtgttgtgatatttaacatgctatataagtaatttttgaaattatcataatttcatgctcatcttagctttcttttatgaggcgatggatttcatcaatggtataaaggaagtagaagtccattaacaactacaatgacgaagatgaaggatatattacattatatgataaatacggtatgatcaatgaagttgaaattgaatcaattaagggagaaattaatgaaataatggataatgttgataaatgtgatgatataattgagttttattctagatgtttatataaactacaatttataatatcaattagattcaaacaatttaaaacatggaatgaagtttatgataatagtggatatcgattaaatggaatttatcaaataataaatgaattatttgttgataaatttaaaggtaaatctgaaaatggaattggtaatttaaatactgatccaagtaaaaggatgtggaataaaagtgttttaaaatggggtaaagttattagtaattttgttgttacagatgaaggtagaaatgatgttttacagataggtaaattttgtgaatttcttcaaatcgaaatggattctgtacttgatggtatatttcttaaagttttgaagaatctctatgggaaaatacttagaagtggtgaaaagggtattttcattaaattagctgaatatgaaacaagagctactagaatttataatgatatgtttcctgaaggtattttctttcatagtagggcatttaatgaactttgtgatattagtcaagaagaatttaaaacacttatttattttgaatttgttaatgattataaaatcaatgagcaatataagatttcaggagataaaaaatggaatatttatgatgattggccatttgtttttcaaaaaatatattagagatacaattgaattcaattgaaatcaatgaaaaaagtttgaaaagtgttgttgaatttattgaaaaattcatatttgaagttgatagattaaagaataaaattaagattgataaaattgatgtaattaaggaaatcacaggtcatgttaatagtaaaattaagaaagatttaagtatgcattatttacattatattaattataagattaaaaatataattaagtataataatagaaatttaatggagaaagagcttaaggaagcttacagaaggagttatattaatgaaacaaatactgggttataataaagttaatataatggagacaagatatgagagtttattattcaatagaatgattgaatgttatgaagaatagaaatgagatattagaagttaattggatggattgtgagattgaaatgattaaatcatttggatataataaagatagttttaagagagattaaaaatagtaaaaatttgaaggaaggttgggataaatgtaatgaaagagaatttgatgatattatattaattttcaaatataactaataattttgataattataatatatggaataggaaaggtaataatcgtatgaaacttaatttaaaattaagaaatgaaattaagaagttttatagaagaaattttaatcatttagagagtaataaaaggaaaattatttttaagattgattattttaattcaattatggaagttaaatatggagaagattgtcaaattgaatgtaatagttatgaaggtatgattttagagaatttaggatgatggtatgaaagaagttgatattgttaataaattagatattgaaatggagattgttaaaaggagtattgatagattagttaagagtaaagtaatataaagaggaaatgatggtagtttaaatgtgaatgaaggattgaccgggtttatagttgttaaataattagatattaaattagatattaaattagatattaaattagatattaaattagatattaagagtgtatttatttatgtaatgtatatatggacatgattaagtgtattaaattaaattaaattaaattatatgacatttttcagccaacgaatgaatgatttaatgaaagtctttttattattagttggtttagttggtatatcttgagtttctttagagggttgagtgtcttgagtgtcttgtttaggactagattgtgtagattgtatatcattttgagattgtatattatttgatgattttggtatatcctgtatatcctttatagtggtattattattatcattatcatcattattagaaatagaatcagaatctgtatcataatctattgatttaaattaaatggtgaattatttgatggattatttgaaatattttgtatcttatttggatttttaaaagaatttaaagattctgaagattcctttaattttaaatcaattgtacgatgaactaatggagaattaattaaatctaaatctattgaaggagatcttttaggtgaagaaggtactgatggaggatgtctatcatttaagtctatagatacagcagctgaccgtttatgacggtgctgaggagggtgaagcatgtatatctttgaaaaggaaaatataacaagtgtttctaataatatatactataagtgataaaattatgtaaataccaaatattttcaaaattacttgttaatataagttaaactatacgaacatctataaattatataatataaagcatatttatacaatatactatactatatataccctacacattacctgaaactaaacgtattaaatcttgacctctttgcttataaagttgttgttgctttgcatgacttgttacaggtgcaaaatcatcctttgaaggttcatctctaaaagaggcagctttaccaactgttgcatggaaatgatttgacagagcgttttgtacatgtgacatattagccagaggacggtaattgcatggtgttgtcggtactgacatagtggatactcctgctatactagaaaagacctatagtaaaggaaatatagaaatgtgaaagtgaacttcgcaatgagtggaaaattaaaaatttattggttatcagctgcttctcttatctatttatctacgtcgaagtacttctttatctttttttatgaatcaattgtaaagcaatgaagtacttcacaccattggatgtacactatgactcaagtatagatcctgaaaatatggatcaatacaagactaaagattataaagctagtactgtttatgctattaaagataataataataataagagcagcaatattaacaattatattaattataaatactatataccattaataagtttaataattatttatattttacatagtcatttatttaatctattataatgccattcaatatgatctttcataaaacttgaaacaaaataataactatgatcataacctttaacaacatttaaatcaatttcccaattagttccctttgatgcttcaactaaattttcacatcttaattgattatcacgataattgaaaacatctttatcaccaacatgaataagtatatcaccttttctatctttattaatttttttaattaaacaacatggatcatattcttcccatttagttttatcattacctaaataattaccaaaacatttttcaccccatggtacaatacttggatttgaaattggtgcaaatgctgaacatgatttaaatttgccttcattacgtaaatgcatcataattgcaccataaccacccattgaatgacctgtaataccacattttgatgtatcaataattgggaaattatcattaattaattggaaaatttcagtattaatataactatacatattataattttcattccaaggtttattaattgaatcaacataaaatcctgcacctgtaccaaaatcccaattatcatcttcaccttcaatacctgcaccccttggtgatgtatcaggtaaaacaactgctaaatttttcaatgatgcaaaatataaaatcattgatttttcacttgcattatcaggtgtacaagttaaacctgataaataaagtataaatggaattttctctgattgtttaataacttttggaatgaaaacattaactttcattaaagttttagtaaaagttgattcatgttcaactttatataatgtaccattattaactgcaatctctgctgtaatcttcatcccgtgtatttgtatattactctaaggaggaaataaatatttacagagaaataaagaaagagattagagagaccaactctatttaaatagccataaagtagaactacgctcgcaaatacttacttaatagagaaatggtatcctatattatattattaatatcaaatgtatattcaccacttggtccttttgaatagatatacatagcatatacaggacaatgtttagacaactatttagattaggtacaaggagatggatcagatacagtgtattaactgcatcaactatatctgcaggtattacattccctattgtatttaatgatgaaattaaaaatttaagtaaattatcaattaaataccctgatggagtaccatttaaggatattgataatgtaccactttcattaaattttaaagataatgattatacattattaggtgcaggtacaagggaggtatcatttttaaaatttcgtgtctatgcattaggtttatatattgaaaacaagggcataaataatggtataaaatttgatgaaattttaaatttaaattataaatatgttgctagagtttgtgcaattagaaatactgatttatcacatttaagagatggatttgttagaactattaaaaataatgaattatttaaagaattatcatcaaataatgatgaaattgatgaaaaattatcacaagctattgataaattacgtttatcatttaatagtgttcattgtaaggcaccacgtaattcacgtatttatgttgaaattgataataaaggtttaaaattttcaattgaagttgttaataaagatggtaaaacatttaaacctttaatgaagattggagatattgaggaaccattaatggctaagatcctattacatgcatacactgatattaataaaccattgataaaagatgtgcaaacaagtgtctatgatagtataaattaaataaactctgtgtatatggccgcatcgaaggaagtatttcttcttcccaaaattccgcaagttaaattctttttcattatttcattaacaaggacttaaactttccttatatccttttaatctggggcaagtataggtaattacaggtaatgacaatgaataaggatattatagaatataagaaattacgtcgtaaacataagaattcaaagaatggttgtttagattgtaaacaacgtaaaattaaatgtgatgaaaatttaccaatttgtacattttgtcagaaaaggaatattaattgttcttatttaacaatgactccttatcaaattaatcaaatagttatttgtcatagagaaaatgataaaaggagaaagaaaaaaagtttaattaatagtatagataaagaatcattatcatcaatttcaagttcatcatctgataaattagattatgaatttgatgtcaatgtcaattatgatgtggatgatgtggaagattatgatgattatggaaattatgatgaagaatatattgcaaatggtcaaggtcaaggtcaagttaataataaccacgatagtgattttgaagatgaggatagtgatgatacaattaattacattaaatctaaatcattcaacaactcatcatctagctcatcagtactgactgtatcacctgataattttcaatcaccagattattatcatcaaacaaaggaaattaatttacgtactaaaggctcaacaatggacaatgtttatcatgcacatgaaatggaaggtattttattacctgaaagtatgggtaggaatattaattttaataataatacaccaaaatatcttcaattatcaacaaaattcaatcattataattataatagtactaataactacaataataataataattataataatagcatattagatgaaggtttatttactaatagtaaaatagttaataaaacatttcaattaaatagaattaaagaatttgaatatttagatgaatttattgaagagagtgaacttttacatgaagcatttcatagacatgatttttattcattactgaaaaaatatggtaaagataatattgatattgaattagttaaagttcattggcatgtattatcaattgaaacagttttcagtaaattattaattaaatcatcaatattatattcattagattattataaaaatgttatattaaaacaaaagattttaccattaattaattatgaaattaaattatcaatttcatgtaaatgtgagaatgaatcagttgaatcaattaatgaaattacaaatataattaaaaacgattatataacgaaatatcatgaatttttaaatgcaagagttagtatattactgggaggatttttaatattaaattattgtttagcatatcattttaagaatggtatgaaatatgatatgaattatttagaaggtaaaaaatctgttaatttattaggtatattttcaacgggattatattcaatcataatggaacgttcaagagttgaattattattgaagaaaattaatatattatcattaattttattaattgattttaaatttttattagttaaaaattattcaattgatttaattgaagattttaagaaattttttgagaagcataataataaatttttaaattatattgaatatgaaaatttaaaaatatttcttaataaacatataccattattaaggaataatttaacaaatggtacattattaaattataataatggatatttagttagaatacttaattcatttcaatcaattataccatatgatttttgtaatggtaatataaatttaaagaataataaaatttttgaaaatgatgaatataaaattataattcatttaatgtatttaacaatggcaagtatattagcatcaatgattccatcaattaatgcattttcatcaaatggattttatggtacaggatggttaatgtataatattgaaaaatcatcatatttaatgaaaatatttaatatgattaaaagtaaagaattaaagataattgcaatttatttaataaggttaagaatttttttgaagaatagatataaaatttatgaaacatatttgaaaaaattgaaaattgataaattatttgatagtgaaatttcattagaggaaaaatataatgaattaattaaattaaaatttcaagatggaggtataatgaaggaggaaatgattaaaagttttctattaaataagggacaatttttcaaaaagagtaattatcctaatgttaaaattgattattttaattttaacattagtttgaataatatgaaaactattgaagaaaatgggaaggaaagtggaaatgggaatggaaatgacaatgacaatgggaatgaaaatgatattacaaatacaaataacaataataataagggtaaaaataggataaaagtatcagcaaataagataaataattatttcaagaatgaagaagaaatgattgaagattttactaaaagtaataatggattatttagtaaagattataaagaatttaatataccaagtgatagtattgcagaggaagttgttacatattgatggtgatgaaatgaaatcattatggaaattattagtttacataaggattaataatttataagagaaaggaaaataagagaaatgaaatgattacataagcagtcacgtgattcaaatattacgtaatactacatttaataaaaactccgggacttatattttccttctaaaagattaagatgatccctctccccggagaataaatgcccaatttgataaatttattattattattattattattattattaaatttcagtgtgatcattatatgttcaattattataattattataattattatgattattatgattgagaattataaatattataaaagggagtccatatcccacttttttgtttatggtctcttcttctttttcttgtatttatattaaacaaatatcaccaccatcacatatatatatatataaatgagtgaatctgaaaatattagaactgatctgataacattaactagatttatcattgaagaacaacaaagacttgcacctgatgcatcaggtgaattatcacttttattaaattcacttcaatatgcttttaaatttattgctcatacaattcgtcgtgcagaattaattaaccttattggtctctatggtcaaactaattcaactggtgatgatcaaaaaaaattagatgtaattggtgatgaaattttcattaatgcaatgaaaggttcaggtaatgttaaagttttagtatctgaggaacaagaagatttaattatttttgaatcaaattctggtaattatgcagtttgttgtgatccaattgatggttcatcaaatttagatgcaggtgtttcagttggtacaattttcggagtttataaattattaccaaattcaaatggtacaattaaagatgttttaagatcaggtaatgaaatggttgctgcaggttatacaatgtatggtgcttcagctcatttaatgttaacaacaggtcatggtgttaatggttttacacttgatactcatttaggtgaatttattttaacaaatccaaatttaaaaattaaagataataaatttatttattcaattaatgaaggtaattcattttattggtcaaatgaaattaatgattatattaattcacttaaaaaaccttgtattgaaaataataataaaccttatagtgcacgttatattggttcaatggttgcagatgttcatagaactttactttatggtggtatatttggttatcctggtgatagtaaaagtaaaactggtaaattacgtatattatatgaatgtttcccaatggctttattattagaacaagcaggtggtatggcagttaatgataatggtgatagaattttagatttaatacctgaaaaaattcatcaacgtagtggtatttggttaggtacaaaatctgaaattgaaaaattattaacttttattaaaaaataaaataaagtaaaagtaaaagtagtttatataaaatgtttatttatttatttatttaaaagaaagagtccattgactggatgtattaatgattgtagttataatgataataataataatacaaagagatctacatctctatatgaaaccttaaataaatcaataaagattcaaaattagaataaaattccctcgacgtgtcctcttagttaacgcatttttctttgaaatggacatttcactttttttcaatgttttctttctcttctactgctcttcttttatttccttttgtctcttttactatagccaattgaacaatgagtgggtttcgtgtattagatctagttaaacctttccaaccttaccttccagaagttttagctcctgaaaggaaagtaccattcaatcaaaaaatgatgtggacaggtgttacattgttaatttttttagttatgagtgaaattccattatttggtattacatcaaatgattcaagtgatccattattttggcttagaatgatgttagcttcaaatagaggtactttaatggaattaggtgtttcaccaattgttacatcaggtatgattttccaattattacaaggtactcaattattacaatttaatccagaaaataaagaagataaagaattattacaagttgcacaaaaaattttagcaattttattatcatttggtcaagcaactgtttatgttttaactggtatgtatggtagaatatcagatttaggttatggagtttgtcttttattaattttacaattagttttcgcagctttaatggttatccttttggatgaattattacaaaaaggttatggtttaggttcaggtacttcacttttcatgtcaactaaaatttgtgaatcaattgtttggaaatgttttgctccaactttagttaatattggtagaggttcacaatttgaaggtgcaatattaaattttgttcatcttttatttactaaaaattcaaaaagatcagctttaattgattccttttatagagataatgcaccaaatatgtcacaagttttcgcaactttaatcatctttgcatcagttgtttatttacaatgtttaaaagttgatttaccaattaaatcaactagacaaagaggtcctttcaatatttatccaattagattattttatacttcaaatatgccaattatgttacaatctgcactttcatcaaatattttcattatttcacaaatgttatattcaagattcccaaataatttaattataaaattaattggagtttgggaaccaagacaaggttcaggtcaacaattatttgcaatttcaggtttatcatattatatgcaaccaccatttaatttacaagaagctttattagatccaattaaaactgttatttatattacatttgttttaacaacttgtgcatttttctctaaaacttggattgaagtttcaggtacttcaccaagagatgttgcaaaacaatttaaagatcaaggtttagttattgcaggtcatagagaaacttcagtttataaagaattaaagaaaattattccaactgctgcagcttttggtggtgcaactattggtgcattatcagttttaagtgatatgtcaggttgtttaggttctggtacttcaattttaatggctgcaacaactatttatagttattatgaaatggctgcaaaggaaggtggtttagttaaatcaattggtactaatttctctgaataaatgctaccttaaaatatataaagtattcattcaaaatatagtaaattaacgtatattatatatcatattgtatataagtaactttttataaaaaataaaaattaaaataagtataaatgaagtaatttgtctaagattattatgataatgctgaaagaaaatcaaaatttcaaaacatgaattcttactctactaattctttctttcttttatcaaattcctaatatatcaactatggcaccatcaaatcataaacgtattaaacaagtatcaatatctaaacctattctttatggtaatacagcaactaaattttcaaatgttaatccaataccattaaatgcaccaaaagatcatacacataaatggacagttttcgtacgtgatgcaacaaataatgatttatcaacatatataagtaaagttgttttcaaattacatgatactataccaaatccattaagaacaattgaatcaccaccatttgaagttacagaatctggttggggtgaatttgaaattataattaaaatttattttcatagtgatggaggtgaaaaaaatgttacacttttacatcatttaaaattacatccttataatgatataattaatattgatggtaaagttgaaagtattaaatatgatgaaattgttttcaatgaaccaactgaaaaaatgtttgaattattaactttaaaaccaagtactttattagataatgaaatgaaacaaagagaaagagatgaattagatagaattggtaaagcaattgatgatataacgaataaaattaatcaaaatgctgaacaatttaaaaaattacatcaagaaagagaattattagttaatggtggtaatgtttaataaaatgttatatgtgtttttattattaaatattgttctctataaatgttatgcattcatgtattacattagataaattattttctaatgaatcatataatatattataatcatatcctaatcgtattttaaccatttctctaccattaccattaaataatataattgaagaaactggataattacctccacctaatggattaactaatttcattaatttacaaattttacccttaggatctaatacaattgggaatgattgttcattaaataaatcataagttggagttataccaataactgatacattatttgatacaaatgattccagtaatggtaaatgatttatatttgaacaatcaaataagaatactaatttaattattttataattttctatattattaatactctttcttaattgatcagaatatggtaatatacaatcaaatgaattaatcaaattacttattgtaaaccattgtattttattattattattaagttgttccttaatcactcttggtaatataatacattttctttttaatttcatcatactcatatgcttcatcatcatctacatattgccttttacgtgatataaatgaaggattacaaattggtggggctacatgaattaaatcatcactatcttcatatttaattctcagatcatataataaatctcttgtcatattaagtgttatatttatagattatagagcaatgtcctttgtgttttgtcgtaggtttaaaagaaaggaaaagaaataacagaaaagaaaagaaatgaaaataataaatagaggaaataaaatagatgagattatcataaaaattatctatcattatttttactgctgatgataagactttcttttcatttggataaatagcaatggcaaaaccacctatttgtgcaatattcttgactaaatttgatgttcataaaggttatgaattgatatattataaatctattgataatatttatgatagtaaagatttagaattcaaatcaattccatcaggtttacattcagttgaaagtgatgtaatatgttttacaaagaatggtaaaatacctgaatctttattatatggattaagtgttttcaaacaaaatagtttacaagttgaaaagatgttgttgatagatctaaagttaaaatgtattcattaggctattttaatcgatccaagacatttaaaatcaattgatgaatttaagacttgggatgctaaaatttatttcatgtatgtgggttttcaaaacagaattaacttcaatgattagtgaatttattcaattggatactaaagagcaagaagatgattatttgaataaatttgaaagttttttcgataattataaatataagaatgaaatatctaaggtacattcatcaccacacataacttcagaggatgaaatcaaatctgatcatatggttgattcattagttgatataattgatgattttggtccattaattttcaaaatttggaaaatttcattattaaggaaatgtataattataaattcaattcatgatggtaatcataatggtatattaattggtgatatttgtaaaattatattttgtatttcattaatatcatcaattccaaaagaattacaggaaaggacttgaaaaatcttcaaagaaagatttgaagtgatatgatgtttaataaaccaatttataatatttgtgttaatgatattgatacaatagttcaaatggatacaaattatattgcatgtacaactgatcaaataataactgagaggaaaggtatttatgattataatatattattatcaaaggaatgtcctcaaataattaatgcaatcactggtgataacgaatatgcaactttcagagataatgaaaaatttcaaataatttattcacaatttaatcatgatagtaataataataataacagtaccactatcattcatccattatcatctaaagttagtgaacgtagatcaattcaagaactgatatggacaggactttcatggtgggcaagtgcaggtgaatcatttagttcacataatgaaatatttgcaaatgaatatgaatttttcgataatatttcaaactgataaagttgaaagattaataagtttagtaggttattttcaacgcattacaatgaaaatatttcttgtacttattgatagaataagagttggaaatgaagaaggaaatgaatatgataatgatattgaagaagacgaagataagataactatatcatttgatccacatgatattgaagaaatgggtcttgatccatattcaaatggtgattgtgaatttattaaagaattagttgaagtttggtgggggattgaagtacgtattggaggttattttgatgattgttgtttttgtccgtgaatttatttattgtaattgaaagtaagagtatagggaggaatatatacattgtatacaattagtttttatattataaacatgaaagtcattaagaagatgcattggttaatattattcatcatcatcatccatcattagttttagtttctttacccattgctttatcccaagtaggtttcatttcatttcgccaatgattaaatctttgtattgcattatctaaattatcgagacctggtctaacatcaaggaaaaatgatggtaaaccaaatggatcatcttcacctgaataataatcaataacataacgaacttgtttccaatcatcaccaccattatttcttaaaactgtccaatcatgtctatcaaatggtaattcagaaccaaatttttcagggaaaatatatgaaagataattatacatacgagctcttggagatattgcatcaggtctaccagtaaattttaataatcttggttgtttaccagtttcttcagtataaggtttttcccattctttaatctcttcccaagcaccttcatttaaaaaattatgaatattaaccatactttcaactgcatcctcaggaacatcacctttacccttacgtaccattgcattaaacatttgttgtggtgaaggatattcccaaactcctgcatcaggtgaatcacctcttggaattgttgatgatgttctttctgttggtaaatcaatagtttgaccaggttgtttttgaatagataattcaggcatattagttaatggatttaatttatcatcaattgttgttgtatcatctgctttatgcattggacatccaggtggtggtgttaatcctgacatattcataggatgtgggatatcatttttaaaattgttatttgttgtagtatttgtattaggagttgaagaccagaaaaagcccatcttttggtataataactagagttgtgtataagatttgaagataaatataacttagggatggttatataataatgataaaaataaataattatctaagatcttcaattaaataaaaaaattctttaacggaaaaaaaatgtcatgaaaattcactgttacaggattggtggttttctattgtggaaaatgaatggtttctgctgcaaccacattggatcatgagtagtgaggaggatattagggccagacatagaaaggaagtcaaggaacttacgggtaaaactactgctatgaaaaagcaagctactaaaagtactaaaaaggaagttatgaaacaaattcaacagttggaagatgaaatgaaacaaagacatattaaggaacttgcaggagatggaagtgaagaaaaggaagaatttgaagaaattacacctgaacaattacttgcacaaatgaatatatcagaagaacctaaaaatgttgaaccagtacagtctactccaaaacaacaaccaaaacgacgtaatagacaaaaggaaagacttgccaagagagaagctgaaattgcacgtattcaagaagaagcaagattagaacaagataaacaaccagatttaagaggaattgaattaagaaatattcaagatttatgtgatttacaaaaagttaaacaacatgatattatacctgatggacattgtttattttcatcaatttctgatcaattaaagataagacataatattgaagttgatgtctatgaattaaggaaaaatgcagctgaatatattaaggaaaatcctgatgattttatcccattcctatttgatgaggaaacaatgacaattaggaatattgatgaatataccgataaattagttaatacagttatgtggggtggagatttagaaattttagcactttcaaaagtttatgattgtccaattacagttatgatgagtggtagagcaccattacgtatgaatgaagatggtgaaaatgttgaattaaaattagtttattatcaacatgcattcggattaggtgaacattataattcattacatgatctttaatcagttttctacctatttacacatatattctataaaaaaacgtctatttacatttacattaatactactagattcctatatttctatatctatttctttttagcacttgcagctttaaaatgtaatatatcaccatcttcaacaatataagttttaccaactctttgaattttaccctttgaacgtaaaattttttcatcaaatggaggatttaaatctttaacatcatcaaatttaattaattctgcattaataaaagttttctcaaaatctgtatgaattatacctgcagcatttggacaagttgaattttctctaattgtccattgacgagcttcaatttcaccacaagtataaaaacttattagatttagaactttcctcatttcttgaattataattggtaatgcagatgatgattcatatgattcattaataccaatttccttttgttgattatttaatttagtttcataatctgcagagaataaaattattggagaatctggtgaaaattcattaacccaatttttaatatcatttaaaaattcattatcatttcttaaataatcttcttcattaacattaactaatataacacttggctttgttgttaataaattatgaatatttaatgcatcaatatgatcatctttccaatcttttttatttataattttttgaccttccattaataaatcatatgcaattgttaatgattcaagttgattttccatacttgaaatttcatgaattggtttattacctttatgttttaattgaacatttaatttttcaattgaattttcaataaattccatatcttttaaaattaattcatcttgaacaattgttaaatctctaattggatcaacattaccttcaatatgagtaatttctgaatctttaaaagctctaacaatttgaaaaattccatcaactgatctaatatcatttaaaaatgcattacctaaacctttattatcacttgcaccacgtactaaacctgcaatatcgaaaatttttaaaatactatttatctttttctttgattgataaagttcttgtaatttatttaatttataacttggtactaaaactcttgcttcctctggttcaattgttgcaaatggataattagctggattacctaattcacttttagttattgcttgaaaaaatgttgatttaccaacatttgctagaccaacaataccacttgttaaattatttgacggtctaccaaataattttttaacatttttacctttattcttattagttatagctgcataacaacgtatagaattccaaaacttcattgatattcaaatgaagaatggaaatgaactacagatcgattaacgtaaattgcgtgaaatattttttttactgcggaaaagctaaagagtttctaaataataggaaaggaccattgaatttaatagtttttgaaactatttcaatgtaagtttagtaaaaaaagtagatgttgaagtagatgtagatgtagaagtattatagtttccttctcttaacatcattttgaattggttcgttatcatcaggtgtgttaaatgattgattcatattatttgccataatattgttaattgacttattaactggcatattcatgttcatgttcatattcatgttcatattcatattcatgtatgcattattcatattaatcattgaatgattattaattggaatatttctttttgaataattattaaccattctattattatttaaattcatattaatacctctatattggaaatcacttacaaattcttttgctcttgaacgtgttaaaactggtaaagttctttgatacttttgtctgacacgtttactaacaagttcctcaggtgattcagttctattataatgtaatgatgaatgataatgtggaggatgtgttaaatgtaaatgtgacattgaatgattatgattatgattatgagaatgagaatgagaatgggaatgactatgatacatcattgctgatggcattggtgtataaatttgaggtgttttagtcattgatttattattattttgttgttcatcatttgctgtataatcaactgaattattatgagaatttgaacctgatgaacaagcagatgatggaactgatgatggaactgatgatggaactgatgatgaacatgtattacaagcagaatttgtaatccaattaaatgaagcagttggagttgttcttggagttggtaaaatatttttaaatgaatgagatcttgaaatttcattatttggtataatatcattgatgtcagaattattatcattatcattattattattattgctgttattatcactattatccttactatcattatcattttcatgatatgaagatctaagacatgaattattcggtaaattatttggagatgacattggagatatcgggaaaaatgataaattaccactttcatttaaattagtatttaataaataaccatttgaattataataaagatttggatttaaatctaaaccaacttcttttaattttttcaaatgttctaattcttcctccttttgtctaacaaaacattgagctaaataaattaaattatgaataaccacattattattcaaatgagaaataatttttgaatctaaatattttaatttaattgaactttccattttaacaacttgatttaaaatcaaactctctaattcatcgaatctatgttgacgaatatgttttaatcttaaatttaagagtgcaaaattagttatcattatcgaacttgcagcaattgaacttgcagtataatttgaaacaatatctgaattaaataatgctaaatcacataaaaacattgaacctaatcttctctctaaattatttggttcacttgtatttaagaataaatctaagaaaatttcaggagttggataagataaatcccaatttaaagtatttaatatattaacttcaattttaaggaaagttgattttgaggattgatcataacctgatcttttaattaaagcatttaatatattaccctttggtttattttcattatattttgaagaaatccataaacaacaaaatccaattaatctacaattattaatttcgattctaacatttgaagtataagtatcaaataaatgaactgccagtgaaaaagttgaagaagtccaattaagtctaaaacaaacatccaataaagaatttaatattgaacttcttaaaattttaacttgattttgaggtaaagaaagtgatttattgttgttgttgttattatttgaagataatttttcttctaattcaaaatctaattgaacaatatgattatgaatatcatttctatattctaatatagttaaatgatgatttctcttttcaaccattttaaccatttcatttttataaagaattggatcagtaatagtcataatgtgagtgtgtctaattgtaattgtatgtttatatttttattatttttatgaataaaagaatgaataaatgcaacaatgagtcggggaatagcaatgaataaatgttttatacgatatgaaaagtcaataaataaagaaaaaaaagcagtgtataaaagattgaatggatatagtatatgaaattgaaattgaaattgaaattgaaaatgaaaataaaaatgaaaatgaagttaaaaatttgaaataaactaagttgaattgagtgtaagataggctaatatgtgagaataaagtgaaggaatactaataaagacgaataagaagttaaaataagataggaataaatacaatgaatgataatataatataatcgaattgaagatgaattgaaatgaaacgaagtaaattgaaactaacttaccttagttattaactcttcccttccttaacaaaagaaagagaagaataaaagaaaagaaagaagaataaaagaaaagaaagaagaataaaagcaagaaaagaaagaaagagaaaggagagtaatacaatcaatcatcgaaaatagaggaaactcgtcgcccacttgttaatttttcttaagctttaatattaatctcttttccgaaaagggaaactccctctttagggttttgtatagtatagtatagtatagtatagtatagtattactttactttatgtacaggtatttacttattctattcagtagtagtagactatatgatagtatagtagaatgtagtattagtagtatagtgtatgatagtatagtatagtatagtatactatagtatactatatgacaggtcacatttattgaacaattacatcattaagtctaccaaatggtaaaaccttttcaatttttttactatcactgattaacataacaattctatcaatacccatcccccatcctccagttggtggtaatgaccattccatattctctaaatatttataatcaggtattaaactttcttcatcacccatttctttattattttgttgaatttgaaatttaaatttttgcttaaatggattattttcttcttcatatgcattcatatattctataccattaataaacatttcaaatctaagtccaatcccattttcatcacttttacttaatggtgatataatttcaggtatattataaataaatgttggtaaaaatttattatccattttattagtaattggttcaagatattcttcaattaatttattaatcatattaccaattgtatcattctcattatatgataatccaattttttggaaatatttaattaacatatctttatcttgtaaatgtttaattgttaattcatatccagtttgatttttaatttcatttaaaaattcaattttaccaaatttaccatcattttcatcaattttattcttcaattgtaaacatttatcatgaaatctccccaatttattatcatttaaaattcctaataaaatatatttaaacatttcttcactaatttccattaattcatttaatccaataaatgtttgataaaattcacatgttgtaaattcaggattatgtgtactatcaataccttcatttctaaatgatttaccaatttcataaattttatcaaatcctgatataattaaccttttcaaccataattcaggtgcaactcttaaattaagtttaaataatttatcactatcatctttattattatcatctttaatatgttgtgaataagtttcaaatggtttagcattagctccactattaccattacaaattattggtgtttcaaaactattaaatcctttatcttcaagataatttctaattaatttaattattttactccttaaaattaaaatttcaacactttccttattaactaaataatcaattactctattcttattaattttacctaaatcattaaattttggtggtattggatgtaatgatggtgatgctaatataattggtttttcaacttttaatgataattcaccaactttagtaattccaaatttaccaatacacataatttgatcaccaggtcttaaaattgaatgaattttaataaattcatccttttcaatattcattactttatgatgaacaattaattgtaattttgttaaatcttgtattatatcaataaacattgaacctttacctgccttacgtatactactaattttacctgaaagtaagtatttcactggattttcatctccttcatctccttcaatatcttttttaccattaaatatttgacgatattcttcaactcttaatttcttaacatttgacataccttccctcaatatgttttcacatttaccaattggtggataatataatttgtcttgttcattaaatgataattgttgaatttgatttttcctgaatgcaaaatcagattcttcagtaattttctccctaatgggagttttattattattattattattgccaacagcagaataccatctaaacctcccacttactgctaacttccctactgatctccccactgatctacttaacatacttgtctttactaccatagaagaagaaccaacgaccgcatcgacgttggatttttccactcattgaaaagttcttcactgatgaagaagaagaagatatcaactatatacaccgtgggaaatttttttaaaaaaaataagattctctattttttagttttacgtaagcaaaaattgccttttttcatgaacaaatgcgctatgtaattttagtaaagaaactcactttaattttttgaaaagtaaacaaaaaaaaagtgattttcaaatttcgagaatgagttttttcatgcgccgcatttacaaaatttttaatgcgccataaattccaaaaaaattgcggatttaaaaacgacgcgaaagataaaaaaattcggagataaaaaaaataaaaaaataaataattcggagataaagaaaaaaataaaaaaataaaaaattcggaaataaagaaaaaaataaagaataagaaaatcggaaataaagaaaaaaataaaaaataagaaattaaataattaaaaataaagaattacaatagaagataaagaattacaatagaagataaagaattacataaagaattacaatagaagataagaaattgaaatgaaagataaagaaaaatacaataaaagataagaaattgaaatgaaagataaagaaaaatacaataaaagataagaaattgaaatgaaagataaagaaaaatacaataaaagataagaaattgaaatgaaagataagagattacagtatttgtaaataatttaacaatctaaaacaaagggaaaagaaagggatagagtcaaaatttctgcttttgtaaaaaaattaggggaattgaacagatatttataacaaatcggttttttaacatccaaaaaaatttaagcgccggaagcttgtcaattttgaatccgattggctgaaaataatatttgtttgcgtcaaaacacaaaagggtttgaggttttttcaaagatcacgtgattatgagggtttaccctttcttaaaaaggaaaatttcctaaaagagtttagtaattacaatttggcctatttgactgtatgattatttcagttttaataaccttttttcgatttaaattaatctattattttttcaatttatctttactaatttacagtattctttatatcgaattttattaacagtaattacttataacttttttttttcttactatagtaacaatattatacaattttttaattgaattacaaccgcttatcataaaaagaaagtattttatctaactttaaaattgtgtttgaggtgtttaaccatagtttgattttaaagcatcataacgaattaatttctgaagctaagttacgcaaaaatattgaagtgtttctgctattattatcatgtatctgtagtccttccaaactcgaatcagcccaattaaaaagggttgaaatttgattcgtttcagttgtattttctaaattgccatcatcttgtgtaacatcttcggaatctaaatacatactagggtcaacgttgtgtatatcttcaatatcaattgttgtgaattctttgtattcatctaaaatcgtttgaattactaatttgacaagtatttttggtaagcaatagcatctacctgatctcagtaactctctgtaaacttttctttttctcttaatagtagggaaaaattcatatttgagcaataatgatactgtcatacatagcatataataaaatttagaattacttatacgtttgaatacactattcagcaactttcctgtgaaaatcttgttgttagaaaagataaagtggtatgaagaatgagatggtatccataatcttaattcgatgttagtattggtggtttctaattcaacaaacaatagatgtacttacggttgctccatttctgtctttgaaaagaaaaggttagaaatagtaaagagttatagaataaattattaaaaacaacaacatgcttgaattgtaaaaataaatgttacgtaagaattaaaaacttgacagattatttaacgttgacacacactgttggacaactttattaacttgcatgttcaatagtaaggcctgcaaagtatataatttaacgactatttaaattacaaagatcattaattacacaacatattcaacacattacattattactcggcagcaaatctgaaaacgtttctgaaatctggatgtttatcagcaataatattgtcatactcttcaaaaacatgaataccaaacagttcaacactattgttcagctccatccattcaaaatcaagatcggaatctctcattctagaatataatgcaaattctaaattcccagaataagttttcatccaatcatgttcaatattcacttttttgaacttcataagtaacttataacgatcatgaagttcaactttaacaagcctttcaacttttacatattgccaattgttatccaccctgaattttgcataaccagttacacctttattactaatatgagtattacgggaatggatatgtttttgttctctgattatcaaactttctccttctgttatttcaccttgagcatacaatcttgaaagagcaccttccatgtcagcatcgggttgagcttttgctgtttttgatgtcgaataacaactcatatggtcatacttatattcagttatgtttttgcaattgtcaatggttaaaaaagtcaactgattttgtgtagttttataactatttttatgagggctcacccttctcctaattgtgcaacaacatctttctgtatgaaaacaccaattatccctaaaagacccaaactctttccacaagtcgaataaatgaaggatttgatgagaaggtacatgaaaatatttttcgaagatcggtttatattcaggaatttgaaataatctttctaatttcaaagtcaatttcaaaaaacttcttctcatctcattcctattattattatcaacaaattcaattggaacatcagtggcaatcaaagcaacagcatatgcattcatttcaatcatacatttaaccaaaaattgataaggagttaacggattcacatttttaatgtcttcagcaatcggtaagaaatataacggaaaaatatgtgtaaaagctttaacatcaatcgctttaactctactcttggtcataagtgaatctaaacaaaggggtatatccctaatctcttcaaatagatgaacttttaccaaatattcatctaggttttttttatgttgaagaattaaattatgtgatgctatatccagacgtttaaaaaccattgaaacaaaaatgctcaccactcttttagtaatgtaattctcataaatagtatgcatcaaatctggacaaacaattttgaaataatcatcaagattaagttgtgaaactaaagattttgcctttactctccaatctgttgtaacatttccagccaaagtttcttccaaacatgatttatacatttcagttgtaacttttatatctttaaagacattttcagcatcatccacatctatttcttcaatttcgtcaaaaaaagtgtatgtaacatcgttattttcattgttagtattaccatcattaccattattactaccttcttcttcaagtctgttacgacgcatttctttagtcaaaggtgtaagaaaaatttgtttttctgatttatgaattgtgcaaaaagaacatggatgatttgatctaggaggtaatgtttccaatacattattcaatgccttcatatcagcagacatcgataataaatttatttttatagtaatttcctgaccattttcaataaaactaaaacctttttctgaaagaagatttaattcttcggagagagccttgcaagtaataccagtatatccaggtgaatcactttttgttaataaaacttctggcatatgaataaaattatttttatatcttaacatttctggcaaatccataaacatgacacaaaaaactttgattcctttataagtcttcacttgaatattacaatcatcactcgaaacatggatgttaaaagtaaactcatttggattgttactgcttacttcaaaaaacctacgcattttatcagattgataaacagtaccaattgcattagtattcctagaatatttctctctctcatcttccatatgttttctgatatctttattttggtaaagcgaataaagaacaggaacgattgactgatatctaaatgattctgcatcacatcttttatgaacttcgttcccaagagtatgctcttgaaggtctttattttcaaaaaaatagagacacagtgaacagtgacaaaattcaatatccttacatgtacctactttgctccattctttcaaaactctttcattgagacgtcttatttctaaatctttagggtgaattaaaccaaaagaatgcatgaatctcaaaataatgttagctttattcatagaaatgtagtgatgagaagacatccaataaacaagaaaagcacaatcagtatgaaagattctcttgaaattatttgccatgaacgcatcaaattgttctgcattgaaatgtggtttttgatattcccaagaattctcatctactggctcctgttctataatatttggatcattttctgttggaacatcttgattaggtcccccctcatcgtcactactgtttccaaaataatcagattcattagaaccacccatattatcaggcattaaatctgaagcatcactaaaaaaaccattattattatcatcatcatcatcattatcaccttcgttaccactatcttcagaagaacttgaatttccggagttaaacccatttgaaggtaacacattattaacctgagtatcaatttgattatcaatataagcatcaaaaattggtaattcatctacggacattaaaacaggagcatcagaatgaatattactagcattagcatcgttggtaatagagaattcacctacaggaggagattcataagcatcagaaagaacattatcatcatcaatattattggaaattgaaagattatctaccgacatttcagatgaagtattttcagaggtagcaccctcaaaatcatcattagttaaaacgtaatcagattcgtatctgtcacaattgtttatttcaataaatggtgaatctattataccattgtaatcccagcctttttcattaaaaaaacggttaaaaatgtcattcaatgtatctgcaatatcttgatctctcttcgtatttaacttcatgaaattaaatgatgattctttaattttttccaaatcatcaaatttaagtcttcttcttgcagcagctttaagtgtggttaaaaacccaagattcaaaccgtatagatttaagagtcccagtaaagaacctctattggttagttttgcatttttgaattttttaaaaatgtactttgcttttcttttattaacttttctagacccatatttattctcaagagtctcaatatcatcattgatattattttgaataaaattatcaatatcggcattaaattgaacatcactagacttctcttgccctgatctctcgttatagtaataattaaaattcaaagttgtacctgctgcaaaacgctttaaccttttttcactcaaaggttcccttttgtgttcctgataagatttgataattttgtaaagaatattttgcacgtttttaatagtgaaagaagatacagatgttatgtctgtttccagtattgatggtactttttccctcaaaaaagagagaaatagaagtgtatcgtctgtgtaactcattagagttgctatgactcaactataatattttagtagttcaagaaaaacgtgaaataaacaagccagataactttgcattctttacaaatttataattaatacgccaaaatgcagtattacttttaattaacacgcgtaaaacatgtttttgcttacataatctttacaatctccaaaaaacttgacttaacgccgcaaaatttggtgttcattacgtaataacattgacaactcactcacagcactctggatattacgtaataaagcatcaagattacgtaataaaattcaaaatttggagttagatgattggttagaatctcctagtttcagggagcccaaatataccggtgagacccttcaaaacttacacattgtcgaaatacaaagggaaacatacgatttttagccccaaaatcgaacaaatttgaattataatggttacagccgcaccaaaatgcgggttttgaaaattttactatgtaaaaaagttacaaaatttcccacggtgtatatatatatgtaaatggtatttttgaaaacaattgtatagaatatgtatacaatttaaccacatcaccttactctgatgactgtgaactactattagacacagaagcatcgtgtcatgtaattggcaatagaaagttattacaaaatatccgtccatgtaatgcaaaaattagatacttacaaggcgaaacaacagttaaagaacagggagatttagttataggtaatgtaactattaaaggtctactatatgtgaaaggaaagagaaatattatcagttttagtagattaatagaaaataaatatatcacttggaaaggatcaggaaatcaaataaaatttcgtttcaagaataaattgatgctattagctttcagagatccaagaaaagactttttctttttacaaaatgcaaataaaaatagcaaaactcactacgttttgaatatagaagatataaatttaaatgatatcattatgaaagtacatcaagcttctggtcatgttgctgcagatatgacacagttataattattacaatcaagaaatttaaacatcaaattagaaaatataaaagaggtacttaaagactgcaaatgtcgtgaaacaatattaaataaaaatcatggtacgaaaaagatcaacaaaactaaatacagagttggtgaaattattcacatagatacaattggtaaaataggtttaggatatgcggttatagcatcagatagagcaactaaaatgacattctctaaacttatagctcacaaatcagatgtcaccgatgcagcaataactatcttaaaacaaatgaaaaatattttatcactaagaaaactaaatatatatatatgtagcgttagagctgacaacgaatatgatacaaaggaatttaaagcctatgctgatgaaaatggtatcataactgaattcactgaaccatactcatcatatcaaaatggtacagctgaaaataaaaatagacaaatgcaagaattaattagaaaattattacaaacagcgggattacatccaaaatactgggcttatgctctacaacatgcaaattttttgtataataatatccaaataagaaagaatggacactcagcatatgaaaattttacaaataaaactagtaatattgatgcaggttttgaaccacctacttttggatgcaaaatgattgcttataaccataataatgttcaaaaggtcttcaaagaacatcatgcaggtatatttatgggatttagacaaactgttaaaaatgcactaatgttattaccaagtgggaagatggttgttacatcttcattccgtgtatttccagatatatatccaatgcaaaagaaggataatgaaaaactatatgataatattttcgaaacatttcgtccaaaacaaagtgaatttgaagattattatccatcggtaactccaccaggtccacataatccatcaggaggttcaggaggtcttggaagcaaaaatgagtcttctaaaggaaagaaaaatgttaataaaaagaaaaatagaaaacctacaattgaaaatgtgccagatgagagtcaactaactaccgcaaataatgatgtaatcatgacagatgcaccaaactcttcatcaatgattccagagagtagaagaattgaaacctcacatgaacaagagtttattccggaagatagaagaatcgaagctctacatgaaagagatattattccagaaaatagacgaatcgaagctctacatgaaagagatattattccagaaaatagaagaattgaggctccacatgagaaagaagcagtgccagaatcaaaaatcatcagtcaacaaaaaactgtatcgtcaaagaatggtaaaagaacaactaccaaaaataagaaatcaaaaattaagaaacttactctaaaattaggtaaaaaggaaggtagtaatacaacaactgaacagtcaagtaaaccagcagagattactaataccaaaccatccaatattgaacctcaaatagaatcaagcaaagaattagttaaatttaagccagctgaggtagaatcaagtaaagaattagttaaatttcagccagttgaagaagaatcagataatgaagaattttatgatgcacaagacctagatcacgatcatcagaatcaagtagttagtattccagaagatgattttcttaccaaaatggcagagttatatgaaaattacaaagaaatcaagaagttctacaaaacagacaaagcatatctagaagcaacttatcatagacattattataatccagatgataaaccaatcccatctgcaaacttaatagacaatagatcaaaagaatactgggaacaagaaggtaaactaagagaacaactgggattaccaactaagccaatgaaagtacattcaaacgagaaaaatggactcagatttgaaaaataaatttgcatctgagggggagaaaagtatggaagatatagttatcattgatgttcacttctaggttttcgttttttctgtcatccgcccattgtttgatgacattgtcttgatatacttccatgactaaacccagaataagtgtcgcagaagttggattaaagtatagcaacatttttgcgtaatccatcataacaatatactcagctgaatctctatgtgatttaaactgtttgagcagcttcaaattatcggcggcagagataattgccattttcatattcatctgcatgaagaacttcagacctacaggttgacttttaatgaagtctctcgaataatataaatcgagtgctgtagccatgatactgttaatttgaccataatccataccaatttgcatttctgtgcaaaaataataaattttgccatttgtcatcagagatattgagcatagcgtatccatttggtacaattgtaaaaccattctttaaataacggaagagaaaaacctgtgtttcttttcttaattggagcattagttttcaaagttccataaattaatttaaggttttcatgagattgtacttcgaatggtaataaagtacattcatatcttcatccagaagttatctcagcttttacttccttctgtttttcaataatcaattgaattggtgataaatccgacatattcattttcgtcagctacgagactgtaaatctttaaagagtactgagatcggatactcaataaaaggattatatagagttaaattataaataaatttcaaaagtgaaaaacttttcacttaaaactgttagctactgcctattcgctaactctcaatacttcacagtttcgtccaattttttttcattatgctttacattatgtgtattactttggatgatgtttcttattggataaatactatattattttaacttacttaactaaccagtaatgtattcaaatatacgtgcacctatacgtttagtgcataagaatggtattagattaaattctactattgttgaagcatcaactaatactatagtaaataattcaactatagaaaaagagaaaaatgaaattattggaaatgatgaaattcgtttaaattctaatggattaccatttgaaaattcacttgaagaaatttctaatatgaaagaaactgaatttaatgaaattgtttctaaaattgaaaatccaactttaaatagagaagaaattgttaattcaaaattttcaaaattattaacattatatagtaatagagataaattaaagaaaacaatgacaaattcttcatcattattatcaaatttcccaaatttaattccaactgatccattattaccatatagtgaagcagaattagcaattagacaaagacatcattctaaaattatgggtaaattaggttcaaatttgaaaaatatttataaacctcataaattaataacaaattcaccaaatattaatcaaatttcaattgaaaaattattatcatcaggtgctcatttaggtagaagtgttgaattattaaataataattttcaaccttttatttatggtaaatataaaggattacatttaattgatttagataaaacttcaacatatttgaaaaattcttgtaaaataattgaaaaaattgttgaaaatggtggattagttttattccttggattaaaaattggtcaattaagatcaattaaggaagctgcaaataaatgtaatggattttatgtttcaagaaaatggattccaggttcaattacaaattcattagaaaatccaaaaccaagaattgaaattgatatggaagatttaccaactaatagagaattaacaactgatgaagagaataaagttattaaacctgatttaattgttatacttaatccagaaaatgcaacagttgcaattaaggaagcaaatcaagctagaattccaacaattggtataattgattcaaatgttgatccaaatttagttacatatccaattcctgcaaattctaattctacaagggtaacaaatttaattgttggagttttaggtaaaagtggtgaaattggtttacaaaatagattacaaaaagttaaagaatataaaaaatctttaggtatggaaattaatgaaccatttattaaaattgataaaatatctaattaacttgtatataaaaatatttaattaaaatataatataaaaatataaaaatataaaaaatataaaaattataaaaattatagagtataaaacttaacttaattattattagcatcaccactactacttctactcatactactactagtactatcatcatcatcatcatcagattcagaatctgatctatcatcctttttaatattatatagaacaactctcattgcaattcttaaaattaagaataaccaatataaattaaccaattgtaaagcaaaaattaaagtgaaaaccattggttgagatatccaacatttatattgttgagttttaaaatctaaaattgaaggaccaattgataaaaattctgttaaaacagaatataaaattttaatattaagataatgtcttgtataaatccaaactgacataaaaaagataaagaatggaacttcaattgatgaattaatataatttaaagttttagataaaccaaggaaaaaatctgatatatccattgtaatataaattgctaaacccatatgagtaaaattaaacatataagataatgaaattaataaaattgtaacaatatgatggaaaactaattctttaaaatctttacgaggtttctctatttgtaacattaaaataattgcttgttgagaccaaaaacctgcttggaaaaggtaataaaatttaaataaccaatgatgttgagtatgaggataattttcataaaaagattttgtattaaagaaccacatatttgaatttttcattatatataaaccgaaaggaccagttataccataataaaagatagcataagtttgttcagtaaatctactaattttagatttactttttaaaccataatgaattgcaattggttttaaaatcatttgaaccataaattctcttaagaaagtgaaaaatataatcatataaaagacaaagcaaaaatctttccaacctttttcatataatggaggattagtatttggtatttgataagacataaataaaaatctatgtaaaggatttgaatcagtataattatttgataataaataaattaaatttaataataaaattattataattggtttaatccaaatatatctataagttaaaattttcagagaaatgaataatttatttaaaacatctgaatcattaattttagaggaaactttattaatttgtttaaattgttcctttttagttaatttaatatcatgatttgaacgaattgtttgtaaacctggaactgatgaatcacctaaattaattttaccaacagatgaatgtcttctatgtttgactatattctcctgattatcagatgacatttttccatgtaaaaaggagataagaagataaaaaagtgacttaaattgaactgcccagaaaagaagaaacggtgtttaatagtgaaaaactctaaacagcacaatttaattttccaataatagaataagcctggctttagtattattattacgttattaattaaacgcgtattattattattattataatcctcgcaattttggtgggtttttccagtattaaatttccgccgggaatttggcactggttttggcactgattttgcgcggaagttatgtgctataattactctcaaatttccgagaataatactatattccgatcaacccagggttcctattaataaaactttgtctgttattattgtcattgtgaataaatatcatcttatataccatattttattaccctttaatttcattattttcccgtattattagcatatattcaatgaattatgtttcactactatcaatgagacaaatatcttttattaagaggaaaatttcacttaaattattattatttataatattaatttcaattttatcttattttactctcattttaaatattcaatacaataataaggataatataaatattttaaataatgaaaagggtacacaacgtgatgtattgaaaaatttaaattcaaaagatgaatcttctagatctttccatgaaaaaatgttattagaacaaattgataataacataattgatccttcaaagaatatacaaaatgataataataataatgatgaggataatattattatcaataacaatccaataacttcacttttaagtaaaattatacctattatagaatcttgtgaaccttcaattggttatgaattacaaaatgaagattcttcaattaatgataatgatgataacactaattcaaatgtaaagaataaaaaaaaattaagattatttaggaaaaaattaaatagaatttatggtaaaaatggtaaaaatgatattggtattcatgatttaactccaattttatctaaaaatttcttaaatgattgtctttatttacctgatgatatgtttcaagaattgaaaatttctcatgaatattttgttaaacatatagaaaatattgaatataatgatattgataataataacggtataaatcctttatatgatgatactaatggtattgtatttattggtggtgggaaattttcttggttaactttattaagtattgaaaatttacgttcaactggttcaattttaccaattgaagttatgataccaacaattgatgattatgaatatgaattatgtgaaaatattttacctgatttaaatgctaaatgtattttattatatgaatttttacctaaaaatttaaatttcaaattaaatggttatcaatataaatctttagctttattaatttcaagtttccaaaatgttttattattagatagtgataatattccaattttaaatcctgatattttatttaatgataaattatttattgataatggtatgattgtttggcctgatttttggagaagagtaactcatccactttattataaaattgctaatagagaaatttcaaataaaagaattagatatgcaattgataaaaaaactccaaatgattattatacaaataatgacgataatgataatattgatattgataatgatataccattacatgatagagaaggttcaatacctgatgcatcaactgaatcaggtcaattaattattaataaaaaaactcattttaaagctttattattaagtttttattataatgtttatggtccaagacattattatccacttttcactcaaggtggtgcaggtgaaggtgataaagaaacttttattgctgcaactttatattataatttaaaagtttatcaagttaatagaccagttggtgtaattggtcattgggttaatggagaatataatggtgttggtatgattcaatttaacccaattattgataaattaaatgaagataattacattaaatttttaaatgaaaaaattttaaatgaaggtacaaattataattataattttatggattatttaaattattttagtaattcatttgctgaaccaatgttctttcattgtaatttcccaaaaattgatccaatttctttatttaatgaaaataaattagttgatgaaaataataatcaatggagattatttgaagatcaaccaaatattggatttgattttgaattaaggcaatggaatttaattaataaatatttttgtccaattgatgataaaccttttaatttaaattatttgaaaaattcaaatattaatcataaacaactttgtaataatattaaggaacgtttagattatttattatcaactgaaattaaatatgataataattaattaagggaatttttgtacattatacttatttatttatagtctcttttaaaattatatattctttgtaaataaataaaaaataaaaaataaaaaaaaaacaaaaagaaagctatatatcactaaataattgtttccatttcctttgcataaattaaagaatttttaattatttctctatcatcattaatattatcttcaaattttaattcatttttatcaaaatagactatatttttctcaaatttccatccatattgatcaataaattctttaacttcagaaatttcatttaaaaataataaaattttcaaattttcaattggtaattgtttataaactaattcaatattatttgaaatattaattctaattgaatttaataatccaggttcaaatatattaaattctttacatgggaaattattctttttggataaaatttcattaactttattaaaatctccatcaattatccatttctcaaattttattggtattgataaaaattcatccttctctaaatcatcaacatttaaattaaaattttggaaattttctaattcaatatgaaacattgctaaatcaccctttgttaataaatataataaatttaaacttaataatttattcttttgattacttcttgaatttaattcatttatttcataaaatggttttaattgaattatataatttgaaaattcatccattttaaataaattaattgaaattaatgcaccaatttcaagtattgacattgtaatttgtaaatcatttggattaatctttgattggaaatttggtactaataaattatgttcaataagttgaattttaattggtgttaataatttaaaacatgtttcataatcctctttttgaaaatgttctgtaagtttggtagttaattgttcaagtgacattgttgatggaagttgattataaagaatgataatgtatttgccttcatagaataaaacctctaatcaatattcatgtgagttcaggtgcgaacatgatttcaaaaaatatacacgcattttcttagtattaagtattattaaattaattatctaatggaagaatctattatttatttttatataaaagaattaatgaatggttaagaatttaagaaagaaagaagtaagggaaaggaaataaaaaagacatgtaataaagaagtaaagaatataaattattaatcattgattattaatttttaacaccaaattgcttttcagtagctgaaacaattggttcaatacattcagcatttaataaagtactttgatcacctaaagattttgcttcaccactaacaatttttcttaaaactcttctaacaattttacctgatcttgtctttggtaattcatcaacaattataattgtctttggagctgcaaatggtccaattgttgctctaatacttaatcttaaatcttgtcttaattttaataatgatgaatcatcactaataattgaattatcctttaattgaacaaatgcaataactgcttgacctgtaatatcatcattaataccaacaactgctgcttcactaactcttgaagaatcttctaataaaacactttcaatttcagcagttgataatctatgacctgaaacattaacaacatcatcaactctacctctaatccaataataaccatcatgatctctacctgctccatcacctgtaaaataataacctggataaggttttaaataagtttctaaatatcttttatgatttttataaacagttctagccattgatggccatgttgatttaactgctaaaacaccttcaacatcattaccttctaaaactttaccagttgttggatcaattataactgcatcaataccgaaaaatggtaaagttgcagcaccaggtttagttggaattgcacctgctaatggtgcaattaaatgagaacctgattcagtttgccaataagtatcactaatatgacaacaaccatgaccaattttttcatcataccattgccaaatttcacttgcaattggttcaccaacagaacctaaagttcttaaacttgataaatcatatttagaaatttcatcttcaccagattttttcaacattcttaaagcagttggtgcaacataaaaatgagttgctttattttgttcaataattttccaaaatctaccaaaatttggataagcaggtgtaccttcaaatataattgttgaaacacctaaagttaaaggaccatataaagcataagaatgaccagtaatccaaccaacatcaccagcatgtaaataaaacatcatctgattgtaaatcaaaaacatatctagttgtcattgcagcacctaaaagataaccaccagttgaatgaacaacaccttttggagcaccagttgaaccagaagtatataacatgaagagaggatcttcagaattaacaggtacaggaggtaaataagatctaaattcacaagctaaatcttgccaataataatctctattttctttcattaaaagatttggattaccagttcttttataaactaaaactttttcaattgttggacattcctttaaagcttcatcaacaattgttttattattaattgttttaccacctcttttaccttcatcagttgtaattaaaactttacattcagcatcattaactctttccttaattgaaccagcagagaaacctgcaaagataactgaatgaactgcacctaatctagcacaagctaacattgcaataattgcttcaggagtcattggtaaataaatagcaacattatcaccttttttaaccccccaagattttaaaataccagcagtttgagaaacatctcttaataattcaccaaaagtaatttttctattttcattttcatcatcagcttcgaaaacaattgcaattttatcaggattttcaaaagcatgtctatcaacacaattataacaagcatttaattcaccacctaaaaaccaagaagcatcaccattttcaagtgaaccagatttaactttagtaaaatctttatcccaagataagaatttttgagccattggaccaaagaaagattcaggattttcaattgattgtttatacatttgatcatattcttctttagaagataaagatttagttggttgcttttcaaagaaaggttttggagttggtcttgcaattataccatttgcttcatgaacgacactatgagttggagaagtcatgatgattaatgattaatgattaatgattaatgattaatgattgatgattgatccaataagaaagagggtgaacagataactaattaatcaattataatcaattgatcaaatgaagataacaaaagatcaaaataaagaaatactagctgagcattaagataatattcaagataatcctatactaatcatgatctcaagagtgaaaaatatcctttcttccactttgtttccattccaccacatgtgagaaaataattagttatgaataatttgataattttatttcggcgtaatgcgttcctgcgccactttattattattagtattttacttagtattctcatagtattctcatagtaaataattataccgcgtttttatctcccataatgtctatgtggcgcagtcccgattgattcccatttaggaaggtcttacaggtcgtatagatagttagtatacgatcagaccaacaattttgatcaaattggaatgttattattatacaatatagaagtaatgattactagtaagaaggaatagcagaagattaagtagtgctagatattagtgacaatgttagtacctttatgtaattgtgtaatagtaataacagtcatgggggagattttgtgagtctatagtgaaaatgttggaccattgataataataataatgataatatttggaaggctcaacaatttattattattatctaacttaattaccattacgtaatcaagaaaaagtaaaaaaagacgcaacaatcattacgtaaccaactagacgcgactactgtattattatattacgtaatcagatatattataagaaaattaaaactaagccaaataataaatatcaacacttatagtgggatctactcatctcacgtaaattttagtaaatttagtaatttagttaaatttattaattttaagagagggcaatccctttttattaaataatatatcctctttaatatagattcaattgtattatattatatctattcactaacaattgtatcaattgtaatatatagtatagtatataatatataatatattataatgtcattaaattctaatccaattaatgattatgattatgatcatgattataattatgatcatgatcaaaataaaaattctcaattaaatataccaaaattaaggcaatcaacttcaaatgctgctcctgcaactcctagaatgttaagaaatacaagtaataataatcctaatcattattcatctaataataataataataatacaatcccaaattctttaagtgatgaatatacaattaatccagattatttacctcctcaaagaactccttcgaaaagattacccaattctcataatagagattcttcaattaataataataataataataataataatggtttattacctggtgtagactttaatcctaatactcctcaaaaaagttcaagaagatcatcatttaataataataataataatccaaatgctcataatcgaataaattcctttaatatacctccacaatcaaatcaacaacattcacaacaacatcaccctcaacagcctccacaacaacatgcacaacccccacaacaacaacaatttcatagaaaggcaattggtgattgggaatttactaaaactattggtgcaggttcaatgggtaaagttaaattagcaaatcatagaataactaatgaaatttgtgcaattaaagttgttacaagagctgctaaagtttggcaaagacaacatattaatgatcctccaactaatgatcctcatcttttaagtcaaagaaagaaagaatatgaaaaagaaattgctagagataaaagaactattagagaagctgctttaggtaaaattctttatcatccttatatttgtagattatatgaaatatattcaatgtcaaatcattattatatgttatttgaatatgtttctggtggtcaaatgttagattatattgttgctcatggatcattaaaagaatctcaagctagaaaattttgtcgtggaattggttcagctttagaatattgtcattcaaataatattgttcatagagatttaaaaattgaaaatataatgattaataattctggtgaaattaaaataattgattttggtttatcaaatttatatactcatgatcatttattgaaaacttattgtggttcattatattttgcagctcctgaattattatctgctcatccttatagaggtccagaagttgatatttggtctttcggtgttgtattattcgttttagtttgtggtagagtaccatttgatgataaaagtgttaataatttacatgaaaaaattaaaaagggtaatgttgaatatcctgatcatttatctgctgattgtatcgatttaatgaaaaaaatgttagttgttgatacaactaagagatctccaattcatgaaattttatctcatagatggatgaataaaggttattcaaatattgtttcaagttttataccaaagagagttccattaaatttcccattagattcaaatattataaatgaaattgttaatttaaatttaggtatttcaaatgaacaagttttcaatgatttaaatgatataattaattcagattattatattcaatgttctgaaaattggagattgaaaaattcaggtttaaaatatgatccaactttattagatccaactaaaggttatcatccattaatttcaatttattatttagtttttgaaatgattcaaagaaagaaaagtaaattagaaaatttaaatcaatcagatatttcatctttatcatcttcaaataataatgtaaatcaatttaaaactccacaaattcaacaagaaccaatatttaatgcagcttctaattctcataatatggctcatgaacctcaaaatagaattgtaactcaaccaatacctcatgaatatcaacataataataaaaataatattcctcaaaatgataattataatacagtcgatactaataataagagtcaaagattaaaattagatgttaatattccaaatccttcatacactttaccatatcctcaaccagctcatacatcaccacatactgatatttcaccacattcatttaataaaaatgattcattaaaattatctcaacaacaaactccacctccacaacaattaaataaatcatcttatgttgaagaaggtggagttaattcattattgagaaaattaagtactaaaaagccaactgatagaatggttcataattatgcaggttcaacttcaccaattagtaataatgctcaaattaataatactgataacattaaaagaattggtagcgtcaaagttacatcaaagaaaaacaacaaattttaccgtcatcaattcaaaatactgcacgtaaaaatatggctcaacatcaacgtgcagcttcagcatataccgcatctgcatttgttcaagataatcaaattcaaatcaataatcaacaacaacagcaacaacagtcattgcattcccaacaacaacaacaacaatcacaatataatgagccatcttctactagtgattcttcaagtgtacgtaaatttcatccatctgctagagcaaaatctgttggtcatgctagaaaatattcacttaataatcttaaatcaaatacttataaaatggattcaaatgctccaccattaccagaatattcaagttctatgatgaaaacatcaacatctaatgattatggagcattctttgatgaagaaatggataatattacatttaatgatgaaagtaataaaccaaaggttaaattaactgataaacaaattattgcacaatttgagaaggcaccaccaaattctatgccatcaattgaatatccaaaaactttattcttaaaaggatttttctctgttcaaacaacatctactaaaccattaccaattattagatatgatattattactgtcttaccacaacttggagttcaatttgttgaagttaaggggggttttatttgtgttcattatccatcaattgttgatacaccaagaatacaagtaagtcactcatcatctaatcataatagtggtaatactaataacaatgtattaatgagtccaattaagaccccaacaaaggtaaattcaggtaaatttaatgataatgaagatcaatatattgataccattgaaggattgaaaactcctaatattagtgaaacatcatcacaaatatcaaaatctaaaaattcatcaggaactgatagatcaagagaggatgatttgaatagtgaatcatatgataaaatagtgttaaaacttcaaatactaataataccaataataccaataatagtgctttaccatcaactccaattaagggacacagaagaaaattttcattaggaaatggaattttaggatcaaagaagggagaaaaattaacattatcaacaagtatgagtggtaaatataataatgaaattaatatacctacaacaccagcagctgctaatttacgtaatttaagtattgatgatagttcagaatctatcgcattagatgaaacaaatggtgcaagtgatatgttagtttcaagtaggttggaacaacaaaattataatatttcatcatcaatgagtaattatgataaggaatatagcaagggtaaggaaaaggaaagaagtagtaaaactccacttaaatttgaaattcatattgttaaagttccattagttggattatatggtatacaatttaagaaagttagtggtaatacatggttatacaaatctttagcaagtgaaattcttaacagattgaatttataatcttttctaatttatttaacgaattaattaatataatataatataataatatagtataatgcatatctaataatatacgaatgaaatgatattcaaactaatgtaaaaagtaagatgatttggaataggtttgcatatcgcgtgaatttgacatgaatttacatgtgatgatttgatgttcaaattatgcatattttcatttaccaaggataatgacaataattaaggacattagaaggatattatcaatatcagtacgaagtattgcagcagttcatttatttacatcatcatgttttgaattatcacaaactgagggagcaagtatgttaccaacaattcaaacaagtggagatttttgtataattgataaaagttttaaaaatggaaataaaattaaaattggtgatttaattgttgcacgtaaacctacacaacctgatagttgggtttgtaaaagaattacaggtatgccaggtgatattatattacttgatcctagtcgtgataatataaatgaattacataaacgatataatgaaaataaaaatgatataaataatgatataagtgaaattgatataccaaacttaaataaaattggtaaatttaatagagatccatatgatatgtatataattgtacctgatggacatgtttgggtaactggtgataatttaagtgattcagttgatagtcgaacgtatagtgttttaccaatgggattaattggtggtaaaataattattggtatttatgcaccaaatttactgaaatttaatggtaattattatagatttttaaataatacatttgaagattatatataaatttaaatagatgattatttaacgtaatttagataatcttaatttatacatatctcttaaagttttggaacctaaataaattgaacaaataccagtaattgaaaatctgtaaagtgattggaaaattgatgcagagaagaaataatcaatgaaataatattcaaatatgaatatactgataatgaaaaggaatgatagtggtgaatattttgtaagattatatgcatttgctgcatcaaaatagttccatgataataataatacaacatttaatattaatatgaatgaatgtaaattgagttgtaactaatgttggtaacattcttggcttttccttaaatgtgaaataaacttcatctctttcattaaatctaattggttttgcaatttgacttttatcagcaattaattttgatgatggtttaatagtaccaacattgataatatcattataatcattatttaattcatcacctgtaattattgtaatttgaattgaagaatttgatgattgtaataaatatggtgaaatatcctttatgaaaatagttactttcataaactttaccttgtaataattgaggataaagataaaattcagatgataattcaggtattgataatgcaataactacatgatcaggattaataaaactttcattatttgatttactttcaattaatgtaaaaccaaatgaaattttcgtatctgttaaatttaatggaatattttgttgataaagaccaaaattttgatcatcaattctaactagccctttaccaacagcaattgcctgacagaaggtaataaaagtgaacaatagagtgattaaactgtacatattctccggtggttataatgaatgaatccacattaaggtaaacgtgtataaaactttctgcgtaacatgaatttcctcactatttaaaatttcatttcattatgcatattcattacttatagaatttatataaaatttaagaactattttactttacttttactttattttacttacttaaacgtttgttttcaagtactaaacgttcaatttctttcttcatactatcattgagttcttgaactctcttattcttttccatggtttgtttgataacatcatattgacttaatgcttgttcaacttgtgcattaattgatctctttgttgcctttaatgtctcgttttcatcctttaccttatcaattaatccagtaactgatatcttctcctcatttaattgtttataattgtttaataattcattatatcctttattatgttcctctaaaactttttctaattcttgattcttattagataatttctctaattcattactagttaatttagattcaattgattcatttaaaattgtaaattcacgatgataattaagtatactactattttgtgatgatatatcaattgtatcttctttattcaatttatcacatccgaaaatgtttaattcatgacgtaaatgagttataacatcaattaatgaataaataccataaactattaaattatgtaatactttagttaatccatatggatgatttttctcatttgtatcattaatatataattgatggactaaatcacaccaaaatttggttgattgtaataattcattagtataacttataggattagatgattgttttgtaatattcaataaagttgttggatcaattgattctaatgttcttaacaatataaatttaaattcttgttgtgaatcaatatcatctaatggtaaaataaatttattaattattaatgctaagtattaaagtttggggtaaaacatactttgatccacatctatacataaatgataaaactaatgcatttggttttgtatttgtaatattagttttcaataataaagtgtaaattttcatacaatcatttttcaattttaatttttgctcatttgttgatcttaataaaaatgaaagttcaataattaattgatcgatttccttttcaatatcatatgaaacatttggtgtaaaattgaaagtattttcttcaattttcaatgatttaagtaataatgaatataatattggtaaattagttgactcataatcacctgctctaatttgactcaaagtttcaataattgaatcagaggaatgtattttatccaaatattcaccacctgatatagttaaatcttgatttgataaaatttcaatgaatttcatcaacatgagatttacgtgattgaatgtaaaatttttgaattttatctatcaatgacggttcataatcattatcatgaatcatcatgatcattttcaaaatgtttaaatgacgatttcctacttctttcactaattcattgaagtgggagagaaatttgcacctgtaactctgtccaatccataagtagttagtacttgaggttgaaattctgaactatttttcctatctggagtctttggtggtcttgttggtaatttaggtgaaacaggagatgaagataatgacatattaacattaaaatcaactatatctctattctcgttatcttctccttctccttctccttcttcttcttcttcatgatcattagtaactacgggtataataagagatgtagctctagatgcacgtagatgagtattataacctcttgatgaaactcttggaggcactggaggagcaggtacttgacgatttcttatcttttccgccaacaatggttgctcattagtattgttaatatcatctgtggtattagaagtggtattagaatgggttgaactgttggtatttggagattgtaattgatcaatgtcatcactaccctcagagtggcttctggtaatggatataggtaccaatggagacggcatgggcagtatatcaaaggaaagtagaataaatctattaacaaaagcactgataaaatctattagaagagcaggttaataataagaaagttgaaaatcactgttttttttctgtgcaaaaaaaaattttatttcaatttcaatttcagtttccatctttaactgtgtttttatactggatactctctattaagtacagcaaatcatgtcaaatatagttggaatagaacacgatagagtcaccaatactacatctaccgactttccagggttttcagcagattctgcaaatactgattggagtctggattattttaaagaaaattttaaactagatattaaatatattactgaaagaactgcaaattttgatttaataggtcttgatacatctattgcaaatgcatttcgtagaattatgattgcagaagttccatcagttgcagctgaatatgtttatattttcaataatacatcagttattcaagatgaagtacttgcacatagaattggtttagttccattaaaagttgatcctgatcaattaacttggataaataaagaagcggatgaaaaggataaatttactgatgataatacaattgttttatcattagatattgtatgttctaaaaatccaaatgcttcaccaaattcaacaaatcctgataatttatatagaaatcataaagtttatgcaaaaaatcttaaatttgaaccacaaggtcgtcaagttgaattatttgcaaataatccagttgtaccatgtgatccaaatattttattagcaaaattaagaccaggtcaagaaatttcacttagagttcattgtattttaggtataggtgcagatcatgcaaaattttcaccagtttcaactgcttcatatagattattacccgttattgatattttaaaaccaattgttggtaaagatgcactggaatttcaacaatgtttcccaaatggagttattgatataaatgaaaagggtgaagcttatgttaaagattcaagaaaggatacagtttcaagagaagtacttagacatgaaaaatttaatggtaaagtaaaattaggtagacgtagagatcattttatctttaatgttgaaagtactggtgcaatgccacctgaagaaatcttctttaaatctgtcagaattttaaagaataaagctgattatttaagaaattgtccaattgcaaacttaaattaaatttagatttttatagaaatcaccaatatataaatatagttaataataaaataaaataaacaatttaatctctaaatatttcatgaattgcttcatgaactttaatattataaatcaatgtattcccctgatatccatcatattgaggattttcattataatctgcattaatatcacccactaatgtatcatcttgatgaattctatcaattaaaccaaatccaaccccataatttaataatatttcaattaattgtaatgaaattattataaaatcaattattaataaacttattaatttactcaacttactcctaaatttaatttcaccaattaaacttaaaaccattgaacctgttgaataagcatctttaacattccaaatatgttgaaaacttaaattatcattccttaaattttcatttaatgaaccatttaatccataacttataccatcataaattttatctaaacaaaaaattatttgaaataaaataattaaacaccaaacaattgaaaatatcgttagtattttccttagaacaacttttttatcatttattgaccaattactgaataatgaattatcatttacttcattactatcaggggaattttcattattattattattattattattattattatcatcagtttcatttctatttgcattaaaatttgccgtaccactacgtaaatttaaaattgcactagttggtgtatatagttgactcaatgataaatttgcttgactaccaataccatttgaattattattattcatattattcaaattctctgcaaatggttcagttacgaaaacatggaaaatatatttaattaaaagacaaactaatgattcatcaaataagaatgaaatataatataacacatgtaaaataactttcatatcattattcattgatcttgataataatttaactgtctgtggatataataatctatcattgttgattagcctagcttgcatagcctgatcctgtactatcatgtttggttgccaattataaagaaggacatgtgaatagatctgatatatcttttatactactcgcttattattattacttttattattattattattattattattattatttatttgtacaagtgttttaaacaatgttactataatatacaaaacatataatgtttataatgccttttataatgttaattaatttttttaagagattggctttcgttcaattgatttaattaaatcaccacctaatattgcacatgattttaaaatatcttcaatatctaatgtaacttgatcttttttatcatttgaatcattaccattaattaatttcattggatatcccataccaactttaaattttcttgattcattacctggtacaattaaacctgtaattactctttcatcaactaatccaccagttttacgtacactccaaacaattacttcaccaaatcttgaaattaattctctataaagattcaatattggatcatcaacagtttcaccatcattttcataattattaatttgttcaattaaattcttaaatttgatattatttggataaatacctgatgaacgacgtaattttttacttgaaatttttttcatatcaaatttaattataatatcataatcctttaatgcaggtgtgaaaattaattgtaaaaatttatcattaatttcaatattatcattatttgttaataaatttaatgcaactcttgataatgatgttaatcttgatgcaatgactaatgaaataccttgagtccaaattttacctgatatatcatcctttgtaccaataaaatatggtactttaacaccttgtggatcattctctcttaatttattaaaagatttattaatattttgataagtttctaaatctaatttatcagttattttattaatataactatcattatttattatattattatcattctctgaatcattattattaccattattaaaatcttttgataaatctaaaattaatggatcttcaatccaattccaatttgataaaaattttaaaactcttaaaaatcctgtcattacagaacctggaattccatatggtgcattatcaataaaacattgtaaaacaatcaattcaattacttcctcaggtaaatgatttaaaatcatttgactatctaaccataatttaaataatctaacagttgcagaataatatggataatgagtaactaaaattgatatactacgatgatgtttaactgaattaatatatttttgcataaatcttaaataagaattttcaattgattgaatttgtgtttgactatttggtaattttgaacaattttcaattgattttaaatataaaaattcatcattttctgttaaaattctaaatgaaaatccataaccatcatttgttaaaatttttaaaattaaaatatttgaattatatggaattgaatttttatctttaataataaatgcatctttaatatttgatgagtttttcaaaatttcattacaaatttttaaaaggaatgcatttttagtattttctaatgaaataaattcatcaggccaacgatttgatgattctaattgaattatacattcattgaaaaaatcaggattaccagttgcaaatggtacaggtaaaattattgaagtatttcttaatgatgaagaaattggtaaaattgatttaatttttaatggtaaatttaaattaaataaatcttttgaaattttatcaaatgataattttaattgaatgaaatgatttggtaaaattaatggttgagaatttgatgaatgtggaattaaaggttttggtaataatgaagtaaatttagatgaattaataattaaatcatttgataataaatgtaaattatttgatgaagataaatgtctatctaaaataaatttaataattgttaaaacaactgaatcagttggtgaaatatcccataaacaactccattgaactgtattatctttatatttccttatttgagctttttcttcaccccaaaatgagacaaatttttcacccaattctttatttgtatgtaatggacctttagttatacgtttatcagattcatttggattaataaataaaccaattaaaagataattatctttatttgaatcatttgaagattttcttttattaattgaccaaggttgagtatttttcaataaatgaatatcaatttgataaattctatcatctaaagcttcaattaataatttataaattttattacaaagataattttctattgtaacaaatgaaattttttctaatgaaccaaatttatcttcatttaattcaattaatttagttaatggtattgaaataattgaatcatattttaaatttaaattattattattaattaagaaaatttgattaaatctatccttaacagtatcatttaataaatctaaagtttcaattgcaaattttttcaaaattgaataagaagattttgtcattttccataataaattaattttagtatttttatcaaataaagttggtacattaaaacctttctttttataatttgaatcagattcatcaaataatgaattaaatgataaataaccatcatcacataaatcttgagttgctaaataacgaattgtacctttaaataattgataacttgaataaccatgtaataaaattttattattatttaaaccaccaccttgtaaaagagctgacattaaaatattaaattcaaaatgaccaaaaccaccattatttatatttgaattaaaaccacgttgtgataaccataatttacctaaagcagcggcatctttaaaactttcagttgattttttagttgtatataaatattttaaataatatgaataagttgttgaacttaaaattgatgcattatatagaggagttggaggtaaatcatcaattgaatttattaaagaattttgaattctaattgaatttctatcaggtaataattttttactttcaaatataccgaaaggtaaacctattaaaattctaattttaaaatttgttttattgaaaattaaattatttttatcatttttatcattaatactttcaattaaaagtgaaggacataatttattaccattatgataatcataagataatttaattggtaaattattttcaggagctaaaattgataaataatgagtaagataagctaaatagaaagcttttttgtaaaaaattctataatttaaataatctttttgttgaattaaagattttggcattgaaatacaaatatcaattgacataccatttttagaattaattgcagttttcaaaccgaatgaaccaactagtgaaacatcatcaggtataatatattgtaaattataatttaaattatttggttttggatcagggaatgggattttaatatttttatcagagaagaaattttgagcttctataagtgaaagtggatttgaatttggaattttaccaattaaattatttaatttatgtaaaactttttcaattaatatacaatgagattgttttaattttaattcattaattaattcatcaatttgaagtttaaaaatatttgatttaaataattcagcagtttcttttgcgatttgaatatcttgagatgaaatttttgcctttttagaggaaggtttagtattttttatactattattactattattattattattattattattattattattatctattgaaatgtcatcattaataacctcatcattagatcttttagacattatttttgaactatgaaatgtatactgtatatatgatgagtggatgtgggggtagttatttagatgcagataaaaatagagaaataaatgtaccaaaattgaaggctccttccttcctttcttgaattcaagatcttgttgccaccaaaaaatatgaaaaaaccaaaaagggaatgaaaaaaaaaattttatttatttaatgcgtgtatttatttattttcattttattatatagtaatggggttttcattttattcattttattcattttataatgtattatgacaatattttttgttgttaggatgtctgggtcgatgggactatacttttattacgtaatatagtatacttacgtaatataccgaaatgaaaaccgaataccgattccggaatataattttattagtatgtaacgcggatataaggtaatataatttgagattacgtaatatatgggaataagaataagaatgatcatcgatgattagtatatagtaggggcatatggttatattatattctgtattagtatagtatagtgtttcaattatactataatatactatactatactagtaatatactttactatataagatacaattatataaactgtaactggaataatagccatgcacattatgcaatttctccatacaataatctgtcaaaatataaaatttgagaccctcttttttcatacaaagtgagaatagtattagtagtattagtagtatactgtttaaaatagaatatttttttttttttttgattttcaatttttgagttttgttaacaaatttcatttagttaatattcatttcagtttgccacccttgattaaaattctttttcttttgaacaacacactctttattattattattattattatcatataattatataatcatattataatatacttggtgtgcatgaattaatcacatcttataataaactattctattactaccccctttttttcaattattcaattattcaattattctgtcaaatatcaatattaatattaatatattataaatcagtataatcatttaaatacatttattccttgctacatatatcaataaataaactaaactaaactaaacttacttaatactctctttactataattaaaaaaaaatttcaatcataatgttaaatttatcaaaatcatcttgttctttgattataaaatcaatttcaatttctaaaaattcaattagaaatattcattatattaataataatattaatattgttaataatattaataaatctaattcattatttagaccttttattatctcaaataaaaattcatttattcgttataattcaactaattctgataataataataaatcatctgataataaaattaaatctaaaaatcctgctgaagttgcatctccaaatgctaatttaccaattccaacttcatctaaaaaattaactgtttgggaaaaagttaaacatgaagctcatcattattgggaaggtactaaattattaggtctggaaattaaaatttcaactagattattacttaaaatgagttctggttatgaattaactagaagagaatatagacaattaaagagaactaccgctgatgttttaagacttttcccatttgcaatgtttgtcttaattcctttcgctgaattattattaccagttgcaattaaaattttcccaaatttattaccttcaacttatgaatcaaaagttgataaagataaaaaaatggcattattaagaaatacaagatataaagttgctcaagttttaactgattcaaaacaaatggttaatttaacttcaaatttaactgatgaacaaattattgattttaaagattttatgaataaatttaataattcaaaatctaatgaaattactcgtcaacaattattaagagttgctaaaatgtttaaagatgatttaattttagataatgttcctcgtggtactttagttgcaattgctaaatatattaatttaagaccttatggttctgatcaaattttaagatatagaatacgtcataaaatgctgaaaattaaagaagatgatagattaattgatgatgaaggtgttgaaaatttatcattagctgaattacaacaagcttgtgcttctcgtggtattcatatgtataatacaactccaggtcaaatgcgtcaatacctttatgaatggttagatatgcgtttacgtgaaaaaattccttcaactttaatgttattagttaatgcttatacttatggtgaagctgaaagatattcttcaactcatgaagctttgaaagctgttttaagttcattaccaagagaattttatcatgaacaagaattacaagttgatattgataatgcaactattcaacaaagattaaatgttttaaaagaacaagaacatttaattcaaagtgaaaatgttcaagaaaaggatcataaaattttagttaaggataaattaagtttagatgaagatgataaatcttcagataatgctaaaaattctgaaaagaaataattttctcattaattaattaactaattaactattattttattatattccaatctatcatatttattattattatttattacaaatattattacaatctctgatattgaaaagagttgttaactataatttacaaaaacaaaacatgaaaataaccattaatgaaaactatttttttacatattagttattctttactatttatataatcttttacatttattattattatttttttttctaattacttatttttatttcttatgggggttaactcttttttttatctgattttctataaacattaatattatataaaaagaaatgattattaaaataaacgttatggtgaatctgtaattgattcaataacatctctagaaatgctaaatccgttttcattatcatattccatttctgttaaatgtgctaattttaattgattcttcaatctttgtgattttgataatttaacgttaggtttcttaatttcaattacattcttatcatcaatgaaacgtgatgcattgttaaaactattattatcatcattttggaaattcttaacagttgctctattaacagcataatgtttccttctttcattcataaatttcttatcaggtttataaatccatttactcttaggtttaaatttcctctcttttatctcttcgtcttctaaacaagctaattgataatcccaaattgttgcataatgttgaaatattaactcatcacttggattcttattaccttgacgtaatttatttaatttcataagtctccaattactaccatcatcaccaaatttaaatggtatttcatattctattcttggtttatcattactgataatttctcttgtttctttaattactggttgtcttgtatcgtaattaatcattttacgtcgtttattcttgaaatcatctttattatagttgatatctgttttacttaatcctaaatctatcgtaccatcagattgtcgtattctatcaagtctagatgtagtggtattgatttcactttttatttcttcttctccttcttcttcattttcgtcatttgatgtattgaaatctggtgtttcttcaataacatgatttgggaaatttttgaaaactaatggagttgtaggtttgggtatattgggatatttatgactatggtttcgtattgaattcattgtgtgtatacttgtaagagaagagtctaaatacaagtatacaatcaacatgaaaatttaggtgtagtataattcttactaatttttttcaaaatcttttgaatttattaaatcattcaaatgtgtatatttatcattataaaatgtgaaatactatatatatcatacctatatactatctacaaggaaaatataatacatattttgtttatttgtggtaaaaaaaaaacaactaagtaaaagatcttgaaccacctctaacaaattctataactttccaaccttcagtatcaacattatccatttcttcaggaactctagttataaccattgcataacttgataataaaatatcttcatcactacctgcaactaattcaccagttttgaattttctgaataaattaatttcttgaactcttgaaccaataaccattacaggtatattatttggttctaacattttaaaactaacaatatcaacacctctaatatctaaaattttaccatcagagaaaacaccttgatctcttaattgtttttgctttgctgcataaatattatatggtgcttcactaaaccatttttttaaaatttcttcatcacctttgatatatgcttcaacaacttcaggtacaatatattctcttaattgtttttggaaagcaattgatgtaaaatttggatcatattctttaaattgtttaacaacttttgcagcttcagtttcagagaataatccaccaaccttattaataatggttcttattaaaactaataatggattttctgcttcttcccatttctcccttaaaattaataaaaatttaccaattgttgaatctggtttaatctttaaattttctttgaaatttgaagttggtttaatatcagttgcaactaatgcattaccggcttcttcattctttttaactaattttggctttttagctaattctctttctcttctcttcattctttcctctttagattcatataaaccataagatgaagaattttcattgaaaacttcagatacatctttataagcttttgtctttgtaacaggttcaacaactttatcaactacatcagcagttgttgcagcagtttttttaacaacttgaccaacaggtgattcccaagctttataagcaacatcaccaacaactttagcagttttgtttattgtttcaccaactttacctgaacctttttgagcaacatcaaatgcagttttagcccttttaaaagcttctgaatcacctaattcatcagttgcactctttaattgtttaatttgatcagttaattcagtatttttcttccattcttttctaaaagtttcagtaaatacttgtaatggagattttggggcaaatttaattgaatttgttgaaaataatctactcttacttgaatttacaagtaatgtagaattttttaatgttgtgtatctatacattataataatatgagatatatgaatatgataacactatttacaagaatgaggatgtgttgtttctttaaataatgataaagtatttataaactgataatcaactccatacaataacttccatttcaataacccttctccggaatcaaatatttttccaattttcatgacactgaaaaatttataattatctctcaatcgacgcaccgtccattaaaatcgacgagtcggtgcgtttttgatattttttaaaatttactactattatcactacatgaatcttattttacaggcaaaggaaggattgatttgatatttaaattcaattttaacttgatttgtcttagtttatatcttttcaaatcaatcaaatcacagtctggaaagtcatatcatatacaaaactttatttttatattgaaaaatggcttttcatactaaagaaatgaaatcattgaaacattcacgtggaatgccaataaatacactaagttcaaacagaaataataataatagtagtagttcatcatcaacattttctaaaggtcgacccttttcaatagctcccagttttcaaactaacaaatttgattttgatacttcaaataatagtaataataatactaatagttctgatattgaaaataataccgatgacatattccgtgaaaggaataaaaggagaactttatatgctacaaatagttatactattaaaccaccaagtcaattaataaataacccattaataaatgaaaaatttaaattgtttaaatatactgtatcttcaaagattgaaaatatatcaactgaaaaggaagatttaacattaattttaagacatgataaattagaaatttcaagtgaaagtttagaatttagagtgaaaataccttatcataatattcaaactttaaaagctccaaatttgaataataaaaattcaacttatctttttggtttaaagaagagtatgtcacaaactttagatgataaggaacatagaattgtcgaatttgtaatttatttgaatgaaaaatggtcaattaaacaaacaaaacaattagaggatttgatcaatttatcacttgatgatcactttgttacagttaaatcatttgatacaaaagatactacaacatattttgaccctagatcgtttgctgcttctgaaccaaattcattttatggtttaaaggataaaagtagaaacaaaaaggttttaagagacattttaacaccagcttcttcttcaatcgatttagataatcctaacagaagggaaagaacacaaagagttaaatcaactattcattatatgaatgaagatgaagatgaagaaaaagcatctgaacaaatggttgttgaaaatggtatttccaccatttcagattatgtacctgatgatcaacaaatttatttcgatccaaatttaaagtataaatttgataataagaaaacttttacaattacaaataatgattttaattgtttgtataatggaaattggattaatgatacattagttgattttttcataatgtatcaattaaaaatttcaaaagataaaaaaattccaaaagttaataatattgaaattatgaattcattctttttcacaagtttatcaagaccaattgaaaatgataattattatcaaaatgttaaatcttggtttaaatcaaataataacttatttgataaagattttattataatacccgttatgcaagatttgcattggtatttggttattataacagatttaaaatatctgaaaagaaaacattcaaagataacatcaaatgataaaaatagtaatgatgatagtaataaagaagataatgaggataatgaaaataatgatagtaatgataacaataaggatattaatagtggtattaatgttcaaaataaagataataatggtgataatgatacacctataatagatcgattacccatagatgatgatctgaatgataatgaggatactattgataacactaatgatgataatattacatcaaataataatgagtcaagtaatacagataagtcttcaaagaaggaaaaagttaatgggattgttcaaatttgtattcttgattcattaagaagaaatcacgagaaagatgctgaatatttaaaaagttttttaattagttatgctgctgaaaaatataaatttaagataaatagacaagaaattaataaacatgtttgtattgttcctcaacaaaaaaatttcaatgattgtggtattcatgtgttatttaatgttcaaacatttttagaggatccaattaaatttaaaaaaaccattttaaaaagaccatatacaaggaaaatatcaattaaaacaagaaaggaaaatttagatattttcaatgctgataaaagattaaatttacgtgaagatacacgtaatttattagttaatttattaaaggaacaagaaattaaaattcgtggtgatgcatctcatgtatgtactaaaactattaaagaacaaaggatacttgacttaaaatcaagaaaaattgtaagtaatgatcttgaagatactacagagaatgatgggaagagtgataatattgagaataaaagtaagtccattgaaagcgaaatttatccaaacaacaaagaaaatttagaaaatatcaattcttcatccgaaaaacaaaacagagtaataaaagatgatattaataagagtatacctgattctgaaggtgatagtaaagattcaacagatattataaataatagaaatgaagataaaaacaaagatagtaaagagagtcatactgatgatgatgaagatgatgatttaatgattacacatgtttcaacaaaggagcctgccaatcgtgaactcgaattatcaaaagtagaaaaagcagctgcacctctgagtaccttaccaataactaaacgtaataaacgaaatagtgattctgaatatgttccccaaagtatatcaaaattaactaaaaagattgaatcatcaaaatccagtcctaatggtacaatgataaaaagaaaacgtggtagacctccgagatcagatagtggatcaccaatttcaaaaccaagaagaacctataaaagaaatcgtacttttgaaaaagatataaaaaatgatgaaaataaagatagtaaagaaattcaagttgaaaattcagataaaggtggcaataatgaagttttctctcaagattcttataagaatccggatgattcatatgcacctattaaaaatattccaagtgatgatgaaaaagcaactattgttgagaaaattgataaagaattagaatcatccgaatcgccaaaacgtgataccattcgtaaaactactacagaaaaagttttggatgcagttgattcagaattattaacacctactcatgattcaccaatatcacctgttaacataaatcactatgatgttggaaaaactcaaagaataaaggaagatagaatagaaaaggaaaaagaagatagaagagttgatgagaacattgctgttattgcagatgaagtagttcctgagaaatttaatttccgtaaaaaagcttttagaagactaataattcatggagctaataataatatccataatgataatttaactgtctctccaataagatttgagaatttgcctgacgataatttaactgtctctccggtgaaacttgattatatctcccctataaaagcctcgaaaataggactcgatttcgtattaccaagtcaaggcactccaccgcctgatttatctaatgatattatcatggaaactgcaactgttaaacctgaattgaaaaaaaaattgagatcatcaacaagactatttgatactaaaaagggtttgcatttacatgattatattcagattgatgatgatgaagtgcaggaagtaaatacggagttcaaaaaagatatgagaaatgatgtttttaacaaagatactaaaaaggacatcaatattttcaaccagggggttaaaagggaaattaaaaatgatatttttagaaaggatgaaagaagggaaattaagaatgacacttttaataaaaaagaggttcaaactgaaaaagaaagatacgatgatgatattaaaagtcttcgaagtgaaaagaagaaatctgatttggtttttgaagtaagtagtattgaaaaaaggaagaataataatgattttaaaattaatacaaaggaggagaaaaagaatgatgaatttaaaagtgctgaaaaatacttcaaattatctggcaatagtaaacttcagaaagataatgattttaaattaacaatcagtgaacaaattaatattgatataagtccaataaaagttattgatgattctgtcgcagatgataataaaagatttatgagtgatgaaagtgtggccaaatcgtctgatcgtgctcatagaattaaagaattgtcatcaaagatttttcaaaaaagaaattcaaataaaaggacgttagttcctccaaaaaatggaattagttctagagttgaaaaggtgttagagttgaaaaaatctgtcaataaagatcgtagtgatatatctatgaaaacagtagaaactagaaaagttaatcttattgctgaaaaatctaaaaatgagaaactcatggataaaaaacttgataaaggtggtatcaaaaaagatgcaactgctgatattgatattctaaaagtggaatctccaaagcttgaagttgaaatcacacaatccaaaatcacagtacctagaaaaactgaacctatgaaagtggaaagtccaaagattaataatcctctgattacaactgattccaaaaaatttgaagcaacaaactcatcatttgaaatcactcccgaaattagatcgagatcttctttcaatctcaaacctgaagttgtcaaaattattgaaactaaacatttggaaactaaatcagaatcatcaaataagcttgaaaatataactaagaataacttaccaaaagtaacaccatcagacattgaatttagtatcaattcagaaacggttacttctgatttatcatctagagcttcatctagctctagatttttggatcgtaaaagtgattatatcatcattgacaacaccaaatcagatgaacctaaagttaaccaattaactgaactaaattttgttggatcaggtaaaggtcatgagcatgaagaagaagaaatcaggattatgaaaaccgaatatattccagataaaaaaccaaaggaagtttttataccaaaaagaagtacatctcccattgaattatttccatatgataaccaccaaaaagaggtatcgtcattgaaaactaaacaagtaacaattgagagagctgagaaacccgttcggaagaagatcaacacgattattagaaagatctggacataaagtggaaactgattcattgaatgaaaatgaacttaaacaaattgaaattgatagtatagttgaaaaaacacaaacttccaatctcttcaatgatgttagtgaagaattaattggtgtatcggaaccaacaaaaggaaggaaaaaaaggggacatccaagctctgaggttgttgaatttaaaacaaaatataatttaagatcacgtagaagtaacagtattaatgaaataagttctggggatatcaaagaaccacatgttgcagttaaaaatgaaaggaaaagaacaagaagaaggtagttaatttcaaaaaagtattgagttatctttataagattatactatttaattaatagttaatcatcaataatcatattcgtatattcgtaaagttatatacatattttacaatttaaacattaaaataagcagcaaaagcatttgctgttatactacttcttgcacttacatattctttaatatcattatcaaaagtttttattttaccttttgttgtaattaacggagctttatcaatttcaggtgttgtaaccatcatataaatttgttttgttatttcatcaactgatatattaacatatttataagttttactattactatcaatattaattgaagatactcgactcttaggagatttatcatgaattatggattcttgtgttgtatcatttgttgaatcatttgaattaattgtcattgaatcagaattatcggtagtggaagataatggaggtgatttaatagttgaattttttaatggtttcatccaatctgtattaacatgtgttgatgttttacttgatggatgtatactttgacctatgtgaatataaagaattattttcaaattcactatctgataaactttgatcaattgttatattttctttattgagttcagatagttcaattgcttcatctgcacttttaataaattcaattggatccaatgatgttgaaaatatacctgctttatcatagggtttaacgggattatcaattttaaaggatgataaagacattgatagcctttgatttggtttagatgcctttgtataaactgttgatgtgaaatttacagttgagtcaacaacactacctgcagtactattaacgtgtttaacagttctatccttcagtgttttctctcttaaagatctaaaatctttcatcaaggttaattcgtgaagtttactttctccttgagaatatgctgtattgaattcatttattatttgttcataagttaagaccgttgagtcattaactataccatgaattctactaaattttgataaatttctttgaatatagtttaaaatatctgaattatctgaatataatttgaatgtgattttactcataaattcagagagattgagtaaaatttcggggataattaatttaactttattgttaaaatcttggtaaatatgttctgcttctgatagttttttctcagttgcttcaatctttgacatatccttctctgttgcattttgtactttaagtacagattccaattttttagtctgtatatcataatctatctttttatgatctcttttaactaataatttttcaaaatttttcaagattttaatcatatcatttgatttttgtgtgaatgaatcacttgatttatttgacaaagtagtgattttatcaagtaataattttgcaagttttgaagcttcctctaattcatgcattgtaatatttgtgaactcttcattgttatcaactaatttatcttgtttattttttttatctaaattacaatgcaaatctctaaaaatatcaatcaccataagaaatttagttaccatacttatccaaaatttagttaatttgatgttttcactttttaaatattctaaacctgcaattgaagttttaatatcagattcccattgtttataaataagatcttcattagatttgtgtccaaacaattgatgtggagttctgtataatgctttccctacaccttttaatgacattgattagatgattgtgaagttagatgaagcagaaagaagaaaatatgcaggctgtaaagttcaaaaaatttattaatcatggtgatgtgcatggattgcgcagtaattccgtttgctccgattgtcttataggtttttaacttaattgattaaatttatagagaagattacacgttattggtttaaagagttgattacatatatataataaatgagagtgtctatatcaattgagatcgtcgtcatcgagcatattttgtagtttgccaaagattcggtcacgatgaatagcaattggatcatcacgatctgtggagaagaattcgtttcttgtgaaagattctgtgtatgaagagttatcatccattgcttcatcaatagcatcatcaatttgattaccaaattcatcatcatcatctaaatcatcttcattatctccgtacgtttcatcaatttgatttctaatacctctaaaatcttccacatttaaactgtgtacaccttctgatcttaaaaaatcagttttactaaatcttcttttatcatttaatattacaaattcatcatcttggtcatcacttggttcatttatacccattgattccatatcacttaaaaaatcaggagaatcatcatcataacctgaatcttcatcttcaggataatcattcctataaaaattttcatcattagaatcttcatcatctgatatcattgtaagatcattatcattttcaaaatcttctaaatcatcatcatcgaatttaatataacctatattttcagtttcccatcttttactaactgccttatctctgtaatagacatcataaacataatcttcgtaatcattatcattaaaaattgcattatcattatcattaccattatcattactattactgttcaataatgtggaacgattaaaagcaccatcactaattgcactttgagaaacacttgattgtcttctctttggtaacttaacactattattaacgacagtctcatcattatccttcaaataatcattcaacatttccaataattgaggattcaattcaactggtttctcattatcttcaaattgagctttctgtaattctgattgaattttagttgattcatttgactgtcgttttaaatcaaatggagaaaatttatcaattaacttcccaacttcataattaacatttttaccatttttagaaggtatgttataaactggacaattgttttgaacacctgaaattgttgataaaacagttgtttgatctttaatatcattttgttcagttctttgaagtctaaaaatatattttggtctctttatacgacgacgtgaagtttccataactaatgcctgtaatggatcatcggtacgttttcttttgaacccttagtatctgtggtggttctttattcatagttagttgttgtttatataataatatagtcttataatgatatacacataacagagtcctatcaataatttggaatacacgggatggagggtggtatttaaatagaatgagaaattcactatataaagtgagggaaggattttaagctcagaggaaatcaaatgacggggagaagaaggcattgctattgctattgttcggagttactatatagcaccctttgctttgatttgatttgctttgtttttgcttttgctgttggctctttttctggcttgtatataagtaatgactggacctatactgtggtcactctatagggctaatagattattcttaaatgcatcaaatcttattgtaggaatgcttttcgatcctgaaaaggatattgtacttgtcactggaggtgcttcaggtttaggatttgaaattgtaaatacattcaagagaaaaggagcaaaagttgtcgtatttgatatagtagttcctgaagtaaatagtaaaaattatgtggagggtgtatattattataaatgtgatgtatcaaatgtaaatgaagttagaaattgtgcaaatgaagttttaaataatattggtattgttacaatacttattaataatgcaggtataacaactggtgaaactttattaaatttaagttttgataaaattgaaaagacaatggcagttaatttattatcaagtttttatacaattaaaactttcctacctgatatgttaaatataaagagaggttatattgtaacaattgcttcaactttaggttatatgtcacctgcacgtttaagtgcttatggtgcatcaaaatcaggtttaattgcattacatgaaagtttaacttatgaattaggtagtccaactttaaatacaactggtgttaaaactttattaatttgtcctggtcagcttaaaactcatcttttcgaaggtgttagaactccttcaactttatttgcacctgaaatggatccaaaagatgttgcaagacaagttctaaaagctgttacttatggttgtagaggtgaaattaaattaccattttatggtaattttttaccaatttttagatcagttccttggccaattgttgcaatgatgagatatatttcaggtattgatacaagtatgaaacaatttaaagaagttggaaaaatttcaagtgcttatgtttctgaaaaagcatcaattatgactaatatatttgcaattaatagtagaaatgatgatttaggagaaaatattattgatgatgttggtgatgatattattgattcatagatatgaaatgtatttgttcactttgctagataatttaattaattttttgcttttttttctgtctaaaactattattattattattattattattattattattattattattattattattataccctctatataaaatgttaaattaaaatgtattcttcttttgctttaaagaaacccttatttctttttctttttattagaagattttttatcatcctttgcacttctctttgcaggtgatgatgaaggttgaactttaaaaaatccatctaatctaccttgagtaccagttttcaaagattttgataattttgatgcaccatctctaattctttgttcactaaatccattttgtttaaccatgaattcaactaaaccttcaatatctggttcctcccatttcaatataacatcatcaccttttaaaacatcaggatttagaaataattctcttgcttctttataaggccaattttcaggtattttatatttagattttggattttcttcaattgatttaattatattttcaatatttttatgttctttaattaattttaatgcagttactggaccaatacctttaattgtttcacaataatcacaacctaataaaatacataaatcaacaaatgtatttatatccatttcaaaatcttctaaaactttatttatatcatattcttcaattttcaattttcttgcctcagcagctgtaacatttcttaagaaatgagccggttgataacagagagtatccatatcttcagatgctgcaccataaactttaccagattttgataattcagcacattgagattcagcttcacaaggtgcattaacaaatggtatacccattaattttaataattttttagcatcttcattttgttcctttgtaactctaacagttcttctttgaaatttttgtaattcttcaattgaaccagtttcctttaattcagttgccttagattctgcttcttctcttcttttcaatcttttctctaattcaccaccttttaaaactggtggtttaccatcgaaaacataacaaggtttaataccatatgatgccattctaatagttctatagaaaaatcccataagatgagaagttgtatcaccagattcatttgttaaattattaccatcttgttgtctaacagcaattaagaattgataaagacacattgatgcatcaattgcaatttttctaccaaacaatgatttcatttcatttgaaacaattgcacgaggtgcatgttccttcactaaagcgttcaaacctttaatacccattgaatatagttgttacttatacttgaaagacaaaggaataatagtaaaccttcaaacaagtcaataaatctgccaaattcatgcattggtatatattagacgcgttgcaatgaaaaaaaaaattttggcgttgttccttgatttattactataccggtttatctgagaaggtagactttgcgtcgacaaggtggtatgtatatcgtaccgtcctttggcagttattggtattgaaagaggatcagtaagaggtattgtgtatggtaataataagtaagataagatgcatactgtaatatgcagtggataaagtaatatccgatgcatataaacagttataacagccatgataaatagtcattgaaagaggctggtagagatataggcttaccaaattaaaaaaaaattagtaatgataaattaccgttcttatcactagtctttttgatcttgaataatttagttctttttcattcttctttcattatacaatgtcgttatctgttattgaacccgtcgtcggtgcatcacctgttttaccattagttgtagagtcaggtattatatttgaagagaaaaaaggaggaggtggaggtcatggatcaagtggtggtggtggaggtggaagatcgggtagtggtggtaatggttatggaagtggttcatatggtcatggtggtactgggtatggaggtgaaggttccggtagtggttccggtagtggttccggtagtggttctggtagtggttctggtagtggttctggtagtggttctggcagtggttctggtagggggtctggcagtggttctggatctaatcgtggtggaagtaataactattataatggaagaggtttatttggtggttatggagcattaccagcaggtcttgttctaggtggtgcaggttatcttgcatataatcatatttatcacacatatgaatcaagtggtacacttgtctatactgaggtaccgtctggttgtacatcaaattgtgttacagtaactgacttaccatcatcatctgttaatgatactacacttttatcatcaacaactcaatcatctacatctaataccaatacagtatcatcaatatcatctcaatcagccaatgcagccaatgcaataccctcccacagaggtcacagaagagttgtagagttgatttcactcagtttattggctgcttacctaatgtaattttttaactattatttgatatttcgcgctttttaaaaaaattgtttctttctttctttctttcttgaataactgaactttgaattggaagtagtagaggttttcttcttgaaatcttatatacacttttatttattattttatctcgtttacgacacatcacaatctatcacaactaatgtttggtagaacttctggatttggtgggtttggtaataatgccgcacctttaaattctgtaaataaccaaaattcttcatttggttcaaataataataataacgctttcggtgctgcatcaaattcaaatcaatcaaataatttattcggtttcggttcaaataataataatcaatcaaattcaactagtatgtttggtgctaataatacttcatctccatttgctagttccaatactactggtggtggtgcatttggtgctaataacaatcaatcaaataatttatttggtggtgcaaatactaataataatattaataataataatgcatttggtacaaataattcaaataatattaatggtaccactatcccatttaaagcttatactgaaaaagatccaactattggtacctcttattttgaatcaattactgcaatgcctgaatatagaaattattcattcgaagaattaagagttcaagattatttacaaaatagaagatatggtaatggtaatacaacttcaaccggttttggtaatactactggtaatatgggttttggtgcttcaaattctacaactaataacgcttttggtgccccatcaactactaataatgcttttggtgccccatcaaatactaatgcttttggtactagtaacaatgcttttggtgcctctgcaaataattcaactggtggtggtttatttggtgctaaacctgcaactaataacttatttggtgcaaataataatcaatcaaataatttatttggtaataataatcaatcaaatactacaggttttggtggtatgaataataatactaataatgctttcggtgcttccaacactacaaatgcgtttggtgcaactaataataacgcttttggtgcttccaatgctacaaatgcgtttggtgcttccaatacaaataacgcttttggtgcaactaataataacgctaccggtggtggtctatttggtgctaacaacaacaataataatgctggtggcggtttatttggtgcaaacaataataacactaatactactggtggtggacttttcggtgcaaataataacactaatactgcctctggtggtttgtttggtgctaataataacaataacgctaccggtggtggattatttggtgctaataataacaccaatactaccggtggtgggttatttggtgctaataacaataacacaaatacaggtggtggactttttggcgcaaacaataacaccaatactaccggtggtggattatttggtgctaataacaacaacaacaacgcaactggtggtggtctctttggtgcaaataataataacaatgcaacctctgggggcttgtttggtgctaaacctgctgctcctgccggtggtttatttggtaataataataccgctgctcctgcctctagtggtggattatttggtgcaaataataacaataatacaggtggtggtctttttggtgctaaacctgcaactccagttggtggtggtctgtttggtaacaacactgcaactaataatgctccagctactggtggtttatttggtgcaaaacctgcatcttctggtggtctttttggtaacaataatgctaccgctgcacctacctctggtggtttgtttggtaataacaatgctactgctgcacctgcttctggcggcttatttggtgcaaaacctgcttcagctggtggtatgtttggtaataacgctgcaactacaactcctgcaactggtggtttgtttggtgctaaacctgcaggcacaacaggtggtttatttggtaataatacttcaactaccacacctgcaactggtggattatttggtgcaaaaccagcaggtacaactggtggtttgtttggtaataatggtactaattcattatcagcgcctcttggtggtggcagtggtggattattcggtaatcaacaacaaacacaacaaccacaatttggtttaggtcaacaacaacaacaacaacaacaatttcaacaacagcaacaacaaatgaactcaaatccttattcatctggtccactgtttaatggattatcaaatattaatgttaatccagttgttcaaccaactgttcaaccaattgctaaaccaattaaggaagctgaaaagaaaaaagtttcacttgttgcagcttatagaattactccttcaccattatatgattcatctgaatcaattatttctagatcaactagtattgtttcatcaacaactccattaaaatcaccagattctgcaattaataaaattgttgaaaattcttcatcaaattctttatcaagctctgaaactgataaattaattttatcaaatccattatttgctcgttcaagaagagttgcattaactgttaaacaaaataatgaatctaaattattagcaaaagattctcaaagctcttcatctaagattattgatttgaaaaatgatatgccatctcaaattaatgatacagttcctgataatagagatgataaaccatctgagaaaaaaactgctgaaaataacgcaactgttgctaacccaattgatgcattaacttctaataatgaagttgaaggagaatcagttccttcaacctctgcaagtgaaaaagaagaagttaaatctgaagataataaacctgaagaagaaactgagaaagaagctgacttattaccagaaggttactacactgttccatcttttgaagaattatcctcatattctcctgaacaattaattgcagttaaagatttcactattggtagaaaaggttatggttcaattcaattcatccctccagtcgatttaacttctatttctttgtcaaatattgcaaatttagtttcttttgaaaaaaatgaaattaatgtttatccagatgagaaaactaagcctccaagaggtgaaggttttaatcaacctgccattattacattagaaggatgttttccaaaaactatggatagaaaaggtattattacagatcctcatcatccaatggttgctaaacatattaatagacttaaatcaatcccaaatatgaagtatattgggtatgatgcagttactggtacttggaaattcgaagtcgaaggttgttgattaaatgatagccctcttttttagaacatttttgattgtatgatatatcattatctgtataaaatttttaaattgatgtaaaaactaataaattacagtaaaattaattattctttgaacttatttctgggctctatgtattttcatacgacatcaaaattgttgcggtttaaagaacattactacttaaataactttttttactgtaatttttgtcattaaaagctctgaatatattagtattattttagcataaactcctagggtggatgacttgttaaaaaatggttttaattgtatgttctaagtttattaaaagaatactttccaaaaacattttaattttttcaaaactttttgcgtttccataataaataacttttttaaatgagttttttacctttttggattattaataaatcttaaagttagactgatacacagcagacaaattgtttacagtttatatcaactaaacagcggtaaacatttaacatcaaatgtatcaaatgcaagttgaaacatcaagttgcatgtttgacaggacgcgatttgtatcaaatttgatgtaaacaaacaaaactttatcaaatcactgatcttctttattttagcaaaagttttaacttgaaataaactacaaagcactggacttacatgaatttcaataaagaaaaggacgtgaaagaaaatgaacagctgtttggagaaaaagatgcatctaaaataaagagattatcattaccttttgccccatctaataaacgaaataatatgcctaacagaagacatactttagtgcccagtagaagtattttaaaagcagtcatagattcaaatttaacaacggatatagcatctgaattagccaagaaaaggagaagagtttcttttgcacccgaagtaactttacataaaattaattttttgaaatcttcagaggaaagaaaacctaaaagacgaagttctttaggtggtgtgagtcctagtcaagataataatgattcaaagttaagtacaactaagtttattgaaaaaattcacaaactggaggcaaataatgtgaataataatgagaatataaaactagataatttgcaaataacaaatcaaataacgaatcaaattatgattgatgaagaaacacaaactatggaaatgagcgttgaactaacacaacaaattttacaacaacaggaaaatatttggaatcacaatactgaacaacataatgaaaagtcagtagatcaagaagaaaagtcaaacagtttgagagaattatttgacgatgtggaaaaggagttaaactcagataatgatgaaattgtggatatagaatttacagaacaaataacaaactcaccaataaaaaatatcactgataacgaacattcagatagatcagaaaatgtggatgaagtgactatggagtttacagaacctttatccttactgaaaataaatgataatgccacagagtttaaaaaagttaaaagtattggcaataatttgaaagagaattcaatagacaacaatgatgaaatcgaccaaagtgagctagataatggatttccaaaagtaaagcatggattattacaatcccaagaattagcagatgacgatcaaatggaatttacggagccaatagaaacaccatttggacgtgaacacaactttgatgacaaaatacccgatgatccatcaaagctggaatttaatattcaagaagttatggaaaaaaatgatgagtctaaacctatggaatttaccgaaacaataaactttgacgaatctatccaaagaattacctcagttgaacatgaaggagctgaagattcacaagaagatgaaaacttgagttccgaagagaatggtaatatcattcattgtgctgctatcaaccctaaccaagaaaatgaggttattcattcaagagcaaaactaagagaacaaagtatcgataagattggtcaaactcccatagagacaaacttagaaaaacatttatcaaaaatgaattcaccaagagaagacatcgaaaatcaaaattataatctctttgaatctaactcaaatctaactactgtagaagaaacctctgaaccacctacaagctcaacttcaaatagtgaaaaaagtaatatatcatccagggaaaatgaggaatttaatcacgaaacagaatatgcagaatataatgatatagataatgaaacataccaacatgacacataccaacatgatacaaccaataatgtatcagttgatatgacaaatgaagaaaacgaaatgtcaacagatatggaaaattcattggtaggtactgaaatgattccattagcagaagttacaggtgattttacagaaaatcaagatgactatgattcagacaattcatttactgatgataatcacataaatgtgtcacttgatacatttttgagtgatgttaatgttcaattctttgattatattgggccatcagaaatggaaatatctcaaacgctgaagtttaatccaaatatcaaatcatcaccagagtcgtcatcttcaccatcaaccacaactacaacaacatcatcgagttcttctacaccattcacccatagccaagcaaaatcaaacttgatggattttatcgacagttgtataaatattccatactatcattatgttattcatttgattaatcaatacagatcatcaattcaatcgatatcaacaatggtaaatactttttcaaatgatgtgttagagtttaatccaaccgcaataagagaatattatcaacaagctgatgatcttaaatccgatttatctacgaattaccaagctattgcatcattcacgagaaaacaggctaagtgtcaaaatctgagatttgtctcaagtcttttggaacaacttatattatcatatgaaagaaccaatctgggattggaaaaagaattaaataaagcttttgaatggagaagaaatgtgttgattgaaagacaaaggatgattgagaagaaaatgaaattagaccaatacattaccagtcttaacacactgaaagacaactggaactccatggacattgaaagaatgaaaagggctaatcaagacatgattgcgcaaaatgaattaaaaaatagtaccaaacagaaaatttcagaaatatccaaatcactgggaagtaaaagtaaagtgttagatagtaagagaaagaagaaagaagatttacttaaggaaattgaagaactcaagcgtgatatagctaataaaacaatacccgaaaaattagacctggaaaaggtcagagaacagctgatacatttagaaaaggaaaaatctataaaattactatcatcaaatcctatatccttactgattttcgatactttaaaaattgtctttaaaaagcttaatatgaatgaatacgaagtatctttggaatccatgaaaagtgaattttttaaaccattttcaccactgtttgatcagtttgtttttcaaaatactaaaactgtcaaagcatcagaagtcaacatttatttgaaaggtttgattcaatcatggaaagtattctctagtgtgtggaaagagttattgacaatccattatcttcattcaagcagtataacgggcgaaatcattcaaactggaattccaattgtcacaacctattggtacttcattatgcaatcacatatttgtacaaggtaatataaaggatttgctcagtaaagatgaaaagattactgttaccgtcgaaagcaagaatccataccaagaagatatcaataaagaaactgttatagagaatctcagaatattgtttcaaaacaaaaatagtgttattaatagattatgtgtagaatagttgtataactgtacaaaatttgtataaaattgtgttaaaaaacttgtggaatccattttagattacactgggtatattaccttctttcataaagatcatcatcgtttatatccaaaaccttaatatcatctaaaagatcattcataataatttttttattatttttttcaaagtcttcagcagatctaatttgtgcttctataatactagtaggaacatcaaccatacttgtgttatcatcattgcatatattcattgcatgatcacaatcctttctagaattttcaggtcttgcaaattcaaaaccttgatacttatgatcggttttattagtcttttctttattcttcccaaaacttaaaaataattcttcttctgaatcatcatcattatcattatcactatcagatttatatgagtgtttcatcaagtttagctttgtaccgtaaattgaactttttgttagattgtttgaaggagtgacagatcctccgaacttttgaagtttgtgcaaacgacttcataatggaatttcttgcaccatcgttatcttgatcatcatcatcctcatcatcaccaccacttgtgaaaactgcctttctaaagctgggcttactatttgcaggatctgatgatatctttctaatattatttggatcaattgaactatcattgacattatttgaccaagtataagcagaaactgattttttcttaaattccacaggtttattcgtttcaccatcactacaatcttcatctgaagaattatccacagaatgattgataaatatagctcttctaggtgcttcagaagactttttcattgttgaattatttatcattggatttgatgccgccacttgtcttccattatttcctcattgttattgggcttctatgattaacagttgaaatagaggctgatgattgaataggagatgttttaactttaacagataagccccttgagaaatttgtatttgcttgattaatgtttgaaagagcaaatgcagtgtttgttgatggactatttgaaattttacggaccattgatatgctttctttagactctcttctatgtacatcgtcctgaattggcatagcttcagatgaattagcagccatcaaatttggagagtttctagctgatgtagagataacacgaacaggaggtctgctgttcagactcatatttctacttgaataactacctactccactcatcggattcaaaaattttgagtaggaatcagtcataaaaactatctaatgatgcaaaacttggatttactgttagttgaactgattcaaacttttcagcatcatttaaatcttttctataatcatacccagcgactttatcaccttcacttgtaacctccactccatctgatgaaatgtcattatttggactactagcatcgatgggggtttccggttcaacacccagcgtacaatcagtcgacagagatggaatttcttcatttgtggtattagtaaaatggttatcctgcgattcatctgatgatggtgtttcatattgtatattttctacaaacagtgcggttgttggcctggattgatttaatgacattttagaactatcatctaacaatgataaagaaactcgtgatgaatttttatttctttcttcagataaaatgtaactacaatcatccttcaaattcagaggaagagagtggaaaggtgcgttcaacatccttgcagggttgatcttatttgaatctgatttctttcttttaaatgcatctgatattttctttctaattctgttacctaaacccacaacagcatcatcaacttcttcattactaacatcaattttcatattttgattccatcttgaaaattcattacccacaaagggatgttgcacaatttgatcaatatcaatacgggtatctggatttttgtcaagtagtttcataatcaaatctttgacaattgttaaatctttttcatttatttgttctgcaacacgccagcgtgttatatcagggaatttaacttcttgatggttaatactttcaaataattgaaattcagattcggcataaaatggtagacatccaaaaacaaggcaatatagtgttacaccaagagaccatatatcaattttattagtaactttgatttgactaccctgtgtagaacacaattctggagctaaaaaagctggagtaccagcagttttggccaactcaaaatcatcttgaatttctccatctagattagcagcaaatgacactccaaaatctgaaattttaacttcattatctttactaactagcagattggatggttttatatctctatgaataatgccttgatgatgtaaatagtctaaaccactcaatacatctctgaagatcttttttgtttcctttaactttaacagaggttctggagttaaatcttctaaaataatattaccattaatatcatttgagtttgtttgaagtttagccaatatttcctcaggagatatttgccatttaacttcacccttttcaaggtattcaagaacaagataaatttttcttgaattttctgcatctagtacttcaattaattttacaacatgaggatgatcacattttttcatgattgcaatttcttttcttattttatcttcttgggtttgccctttacctctagttattctatttagtaataatgcgggtttacctgttctatcgactatttttattgcaacatttttacccgttgctatatcttttgctaatttaaccttaccatgttgacctgaaccaagatcttttaagatttcataggtattcaaaattctctttcttgtcactggatcatattcaacatgtacataatgagtttctttcacacgtgaaattttagaattttgtgattcgttattagatgataaattagcagttgaactcaatgatgtgtttgaagcactttctttcaaagttgatgtagtggtataattatgattatttgataaatttgatgcatcccttgatggactcatattttgacaaaacaaagttctcctcttagatgttcttttaccagctctagcaagactcgttaatgaaacatgtgaactttctctagatggaattggagaagaagttgcggatcctttagagcctagtaattgttcatgtgttgttaaattgttatgattaaaatctatacttcgacgagttgaaaaaagataatccgttactttattagccaattctgatatttttgaatgagaagatgcaactggtgaactattagatgatatttcaccatcgatagatgtaatatgctgtggtatatttgaattaataatagatttagttgaactttgtgagtttctcggatttcgaccatattcatgattaatatcaatttctaaatcatcattactagtgtcagaaaatgaagaattcagattatttattgatgatttaacttgaatattagtatttgtagttgatggatccgtacttggctttatatttaccaaagaaattggatttgatgtagattttaaattatttatcatgtttattagttatagttgtttgccacagtccgttttatgcaaacaaaaaagtttatttaaggaactggggggatatgttttgggagggggttgacttgaaacttgatgtccaatactcaaatagaacttcaatcaattgacaaggttctaaatgtatatttgttagagtatatttctctgatcaattgtcacaagataatatcaataaaatcaataatgaaaacgacataatcacagaatttagccagtggaagtaaaaaaacttcgatgtcctcgcagttaaaatctcaagtgactgattttttcctatgttataaagtaagagctctttctaggcctttttcttcgctattcactacactgttggcttaacaatcattatttacatggttttagatatatacaatacatgaaatgtatagagaaatatttatataaatttgtactaattttaatcgattgggtagtatttattacctgctgcatcatatgcaatttttctatcttttctattatctctgaaaacacggccgtatctgtaaccaaccttaccaactttaacaggtgtaaatttaaatgcatatttatcacctttatacattgaagcaataaatgaaccatcatctttcttttgtgcttgcttgattatgagatgaatgttcaccaccttcagataatctctctaatgttacagctgcaggttctaaattaaattcctttgccgcatcaattggaccaaatggttcagattctgcaattgttaagaaacgtgattgtaatgtttcctttggaattggaatttctgttaaattctccgcattcttatctgatttaaataatgggaacattttatacattgtttctgacattttctttaaatcatcctttattaatccttgttgttcccatgaattttcaacttcttgtaattttaaaattgcttcaattctttgaatctttaaaccatattttaaagctgcttgttgagatgatatttgatttacaagaatatcttcaacaatttgtgctttagtttctttactaatttgaagatttgtaaaacatttagaatttaatggaaatggttgtaatggattcttagatctacgtctattattttgagtatcatcagtttctctaacatcaaattcactaagtggttcaagtaatgcattacctctttcatctcttggatcaatataattagttgaatgattgttttttggatatgtatatttgttaagataatattcacctttataattctttggaccaaggaattcatccataagacgtttgaaaactgtttgtttacgaccatttctagctggtggaatattacctgcctttgaataaaatggatatgcaagtgttcttctataacgcacttgtgacacttgttgatatccaacagtcttcacagaagacgcactactatctataatagactttgagaacatagttgtgtgttgtatcaaaatatattgtatttaactctaactaattcagtaagttcaactgttgaagacatgaatttttcagctttttcgttggcttcagaaattttaaaaattcgtttttttaagaaaaatttactaacaggaatcgacccatcgacgcaccatgtccgtctcttacttttaaggggtgctggtttgacatcatgaaaggatcagcatgctgggttcaaaactcaagaccagtaagaaggggatcatgatgatactttacaactgtctaataattacaatgattttaattttaaaaatttaaataaatgtaactgtaacttataactataactgtgatataaaaaaaggaatataaaataaaaagtagacgggtttgaatgataaaattatgctgtgtaatgggtattgaatatatgaaaaatatactcaatttggtgatataataatgtacaaaataaaacgatattgaaggaaaaaaaggattgaaaatttattaattaatattaattaaatcttcaaatgatttaacaatcaattaaatcaacaacctttaagtaaacttcttcacattgggaaccaatatgttcatcgtataagttatagaaattaccagaaagacattggtagaaaacagtagtgttaccaattgctaagttaccatcatcagagattgaccaaccagctgcatagattgcacctgcttgtggtggtggaccatcgaattggaattgtctgtttgcaacaattgaaccaattctaccgtgagcatcagttaaaattgaatctgttaatttcatagttaaagcatttggattcttacatgagactgggaatttgttatcatcagctggagtagttggttcagattttttatcagtagcagttgaagcttgaatttgaccatcaccaatttgagttgcaacagtagcagtggaagcttgaatttgaccatcaccgatttgtgtaacaactggagcttcagttttagtagttgcttggatttgaccatcaccaatttgtgtaacaactggagcttcagttttagtggttgcttggatttgaccatcaccgatttgagtaacaactggagcttcagttttagtggttgcttggatttgaccatcaccgatttgtgtaacaacaggtgcttcagtcttggtagtagcttggatttgaccatcaccaatttgagtaacgactggagcttgagtcttggtagtagcttgaatttgaccatcaccaatttgtgtaacaactggagcttcagtcttggtagtagcttggatttgaccatcaccaatttgggaaacaacatctctctttgctaaagcagaagaagaagcctttgttggaagtggatcaatggaaattgcaaaagcagatgggtagttggtagttgcagatgctaaagttgcagttggggttaaagtggaccatggttcagatggaacataagcagctaaagattgtgcaattaatgataaggtagcaacggataaagtagaagttctcattttaatatatttaattttatatttgtttgattatttgtttgaataaagagttgattgttctttgttcttttggatgataaaagagaatagaataaataaagatagaattactttgatctatgtggatcaaggtactcttttatacattttggagaaaagttttaaaatacaaccctccccacccaaactggtaattcaagtcagcctttgtttgttttgctggtatattatatcacaaataagatcatctattgttcaatttgaatgcctttgaaagtggctggtcgcgttaataataataaattttgtaatcactttacctaattgggaaataattcctcattcgtacttaatttatttttagaatttcaccaaactttaatggctggtgttttcattttgctattttaggcattttgatggctacttcaacgattacaataatcatcgaaggctatttttatcatcatctggttaattattaaataaacgaggttttaaaaatagatcaattaaaattattttattttttacagatttttcattatatactcattatttattcgtcgatacattggatcattacgtccgttaaaaaaattagactcatcaaatcaaaatcaagaaagtttcttaaggacccctgtcgatttttgatccttttcacgttcactaactgttactctgtttaacattgccataaattctttagcatatggtgctttggtaacactgctgtcatttaaattttgaacaacttctaaataattatgataaatgtcaccattgaagttacccaagactgaattgatgaaaaagtcacttaatttgaatgaatcatgttaatccaacaacatgttcacgaatctttcccagaatgacatatgtttctttctctaattgcgagaatgtgttattagacagaacacctgtttgtaaaaagtgaataccaaacttttcaatattagtgtatgcaaataatattgctaaattatccaattcttctttaacttgtttcgttttgaacttcacttaatttgacaatccatttatcaaggatatattcagcagcatatagtttagacaatgctaatttttcatttgcaataatatcccaattcttaccattgttctctaaatcatttagacatttcaatgatattctgaaaataacattttgtaaagcagagttaagcttgttaacagtctttcaaatcctgatcattttttaatataacaccttctttttcagttttctttaagaatgaataagttaccatttgccttaccatttttcaaataactcattaccctttgaattgtgattcttccactattttgtgccaagatattattatcaccttcccaagtacattgaacaacatgatctgcaaaacctttagcaaaaccagaatatgcagaataaccatgaccaccacaactttgacgacattcatcaatcaaatcagcagttaaccaagtacaagtacttttcaaacttgcagaatctgcaaacaaacctttcaaatcaaaaatagatttacctaactattctcatatcaccacttcttacaccttgatctaaattatttaagatttttttatgatcggattggaatttgattagatgcaactactcataccataaacccatgcaagatatggtaataatcttttttgatgcaatggataattaattaattgattttccattttttcacctttaacagtaaattgtctacgaccaacatgcatatcttaaagcaattagtaacaaatcttgaacctgttctgaaactatcagttaccatcgtaactctaccacctaataatgcaccataagataactgcttctaatggaggttcaacaacattaccattagcatcaactttagtaaacttactcaacatatattgtcttggaattctaacacttgaaaattgaatccaaccattatcaataccatctctacccattttttcaccaatatcaccaattgcaataccaggatataaatcatgatttgaatctcttaatggtacaacaaaagttttaacaccataatctttatttttaacaattaatcttgcataaacaacagtatgagttgcactatgagctgcaccaccaatccaccatttagttgcaccaacatgaggtgtattaataataaattcatcagttgataaatcaagtgtagcagttgtttgtaaagctgcaacatttgaaccatgtgcaatttcagtcatactaaaacaaccataaatatctttaatatacattgcacctctttcaaaagcccaatatttatattgttcatcagtaccattacctctaacagcactcataaataatccaagatgaacaccctaatcttgtacctaattgaggatcaatcattgcaattaaatttaaacgatcttggaaaacttggaaatctggtgcatcttgttccatatattgtgataaacgagcaattttatcagcagttaatttacgatgttcatcacgggacatttcataatattcaggtttaacagctaagacaggatctctttcaatctgttgcataagacgtaaagtatgaagtgcttgatcatttgaaccttcaataaaagaatgcatttcatttaatgggaaagtagttaatgctctttctttccagataagttgttgaggatctggttccattgaatttgggagaactgtttgtttcatttttgttattcttagtaagttttttttttaattataaattttttatatattatttacaagattcataatattaaaaaacatcacctcatcgtataaaagtataacaatagaggaaaccacgtcttttaaatagcagctataagcagaaaacagacttagaaagaaatccacccactcggagagcggggaaaaattactccgagaatgtaaattgtggggtaaatgcattgatctcatctctctctaattgcccgaaaactgaccttccactgtagctacaatttcaccggtgcaagtcataacagttgcactgagtttagcagtagcagtagtgtttgtactttttacagtatttgggataatgaccggtggatgtggttttaataacgaacgagcctaagtaagggaagttcttagtatgatgattccaattctcttcacgattgattgttagtgcgactgttgaaatacccgttttaacgccaatcttctctgaaactagtgatttcatgtattcttctaagaccaattgtgctttatcaaatgttccattgtcattgttaaatctccatctgttatatgcaaaaccgggtttgctccaaggattaacttgtgaaaatgagggtaatttgaaaactgcaattcttgaaccatcttcagtatttttaaattctaatggggctgtaggtaaaacaatcatttgtttgaattgcgaattagttgttggttcaatgattgaatggatttcaggattttcaacaagaacatactttttatcagtttgtaaagctttaacaatttttgtaaaatcatcatcaaaatttatttgtaaataagcattattaagatcagatttggaattaaaattaccgagatgattagtatcatgacgattgcatttaccaattgaataagcagcccataaacctaatacaccaaatatgaagaatccaaatcttctacgacgatgtgatctaaatggtccataaccataccgtctatcccagcaattccaatctctgtaataatcatcataattttccttagagctactatttgcatttgcctgaattactagcactggaatttgaggtgttttgctgattagttgaataatgtgagattaattttggttggttaattaatctcttatttaaaaaatttgacttaattgttgttcttagcatttttgtttggtggtttatataaaatttatgatgatgatgaatgtgtatacgtggaatcactgctctatttaaacaccttaatgttgttaaggaagtaactgtacacggagataatgataacctgattaattatttcccgttatgaaaactccgatataccggagataatccggcgataagcctaaaattagtccccatattattgttatcgccgcttgtaatgtcacattgccaactttttcgtgacatggcaatttttcgagttcggtattgccaatagatgttctttcaccaggtttcagtccagtcacgtatatcgtaattacggctccagttaaatataagataatatttgaattgtaaaaatggatacaagtcaattagaaaggtttattgaattcccaattgatttcaaaggtcaacaattagttgaacgtatatcatacgttttgataacatttggttttataatttcattatttttcggattcgcattacaagacataacttattccttttatgcatttataccattcgttttattatcaataataattgttttaccttcttatccagcttataataagaatccaacagttttcttgaaaagaccagtttcaaaaccaattaatatcgaaataaattaagctaattgtataattcatgtttaccctttttaagtaactatatatcgatataaatttttcctattcctaatctattaataaaataacaataattatattcaagcattatgtcattatacttaggatttgatttatcaacacaacaattgaaaattgtttcaagttatgaagatctgtcatttcattcaaaatactcaattgattttgatgaatttagtgggaaatatggaacgacaaaaggtgttattacaaacagtgaaacaggtgaagttgttagtccagtttgtttattcattgaagcatttcaaactttattagatagaatgaaaaatgatggattcccattcaataaagtaaaatcaatttcaggttcttgtcaacaacatggtactgtctatttcaataaaaactatgaatctttattagaaaaattatcatcaaattcaaataattggtgtgatgatttatgtaatgggttttccttcgatacggcatctaattggcaagatagatcaacaggtgaagaaattaaagcttttgaatctgcattaggtaatgcaactgaactatgtaaagttactggatctaaagctcattatagattttcaggtttacaaataagacgtcgtgccaaagaaaattcaacaaattggaaaaatactaataaaattggtttaatttcaagttttctagattctttacttattggtaaattaagggggattgaaattggtgaagcatgtggtacaaatttatttgatatccaaaaaaataattggaacaatgaattattatcactattattaatgaaaaatgttaaagttgatgaaaatgttaccatggatgaacaatctaaggcaagtgaacttgcacgtcaaatgattggtgaagttgttaaacctgataataaaggattcatatctgattatttaattaaaaggtatggtttcaattctgattgtgtcatttggccaataactggtgataatttagcaacaattatgtcattaccattaaataaagatgatttattagtttcaatgggtactagtacaacagttttattattaactgaaaaatatgtaccaagtattaattatcatttatttaaacatccagtttgttcaaatatttatatgggtatgttatgttattgtaatggtgcattagctagagaacaaatacgtaacgaaattaacaataaatgtgaaactgatggatgggataaatttaatgatgtattgataaatcaatatgaaaataaacataaacatgagagtgataataagattggtatttatttcccattgggagaaattatacctaatgcaaaatcgtgtaagagaagattcaaatatttaaatggtgaattaattgaattaaataaaggtgaatattcaattgaggaagaaactttgcttataattgaatcacaagcattatcatgtagattaagagtatgtccaatgttaagtgagaaatacaagggagatgagcaaaatgaaataattgaagaatctattaaacaactaaaatctatagtcggagatgaattaattgttgataatgtttcatattcaattgaagaatttattaaaagacctaataatgtttattatgttggaggtagttcaaaaaatcaatcaattacaaaaatttacaatgaaattttaagtccatcaaataaaggttatagagttgaaattggagatgcctgtgcattaggtggatgttatagagctatttggggtagtacagagaaagaattaggatttgaagaatggattacgaaaaagtttgattttaatgaaagtttagaaataattgaaagtaataatagtattgaaaaatggagtgaatattcaacaaaagtaggtgttctgagtttagttgaaaaggaacttgaggtttaatattattttatttacttttatactgataataacatgtgtatctaaccaatgaataatttaccggatgattcaataataatgcgagtcggagaagacaaatgatccggagataaagaatcttttaaattttttcaattactcgacatgattcacacttatatccgggggaatttatgaaaatttgataattggtcatcaattagtataataaagtacgggggactgtatattgattcgatatagtaaaatacaattgtaggtaattttttaaagcatataatgaaattgaatttatttaagatatagttatataatcatggtatgaaatgatatatgatatagtataatgtagttaattaattagaaaataaaaagatatatgatgatgagttattggtaattgataagtaagacaatgaaaaacttaagcattgtagaagcagttgcatcaggaccgagagtaactctattacgtttagttttataatctttaattgcagatttaattgcatcttcagctaacattgaacaatgtaatttaacaggtggtaaacttaattcttttgcaattgttgtatttttaatatttgcagcttcatctaaagtcatacctttaactaattcagttgcataacttgaacttgcaattgcagaaccacaaccaaaagttttaaatttaacatcttcaattataccagtttgatcattaactttaatttgtaaacgcataacatcaccacaagctggtgcaccaactaaacctgtaccaacatttgtcagagttttatccattgtaccaacattacgaggattttgataatgatctataacttttggatgataagctcttgtaagagatggtttaattgaacgaacaatagaaggacgagtagatgagaataatgatcttgcaaacattgtttgattataaagaaggaggaaataaaagataagaaagaaagagataaaagaactaaaacgaaaagatataatacaaaaattgataattaatttaaaataataacctatacctactcccctttgttcaaataataaaataaagcttaaaagatattattaatagagaagaaattctagcataattaaaccagacagacgcaacgaccgcattaccttgccttacgtaatcacatggagaaattttttaaattttaaaataattttattcagtcatagtaatcggataaagaccgccggtatccttgaaaatggaaattgcaatatttttcactctcagggtgggtagacgatagtgaagagatttcactgattgattgtacacaattaagatctcttttgatttacatcttataataaacaacaaaggtagtagtatataatgtcaattgataatcgtcctttacctttccattatcaattcttatctggtgcagttgctggaatttctgaaattctgacaatgtatcctttagatgttgttaaaactcgtattcaattacaagttggtaatgctgcaaatgctgaatattctggtgttattgattgttttactaaaattgttaaaaatgaaggtcctgcaactctttatagaggtatttcagctccaattttaatggaagctccaaaacgtgcaactaaatttgctgcaaatgatgaatgggggaaattttggaagaaaacttttggtgttgatcatttaactcaatcaattgcaattcttaatggtgcatgtgctggtgcaactgaaacttttattgttgttccttttgaattagttaaaattagacttcaagataaatcaaaagcttcattatataaaggtccaatggatgttttaatgaaaactgttcgtaatgaaggtattttatcattatataatggtcttgaagcaactttatggagacatgttatttggaatgcaggttatttcggtgttattttccaagttagagatttattaccaaaggcaaatgatgcaactcaaaagacaataaatgatttagttagtggtatgattggtggtattgttggtacagctcttaatacacctttcgatgtcgttaaatctcgtattcaaagtgctacagctgttgaaggtcaagtacgtaaatataattgggcttggccttcattaggtatcgttttacgtgaagaaggttttggtgctctttataaaggtttccttccaaaagttttacgtcttggtccaggtggtggtattcttcttgttgttttcactaattgtatggatttcttccgtggtgtttattataaagaagataaataatcttgatgaccttttaaaatttgtcattctattttactttttaataaatttgtctagttgtattactaaatttaataatgcaatattttctactctccccggatttttaaaaaattttccgcaaacggcgataacacatcaaagtttgactaatttgtaaaaatataacaattgaattaattaattcttgatgggcctcttaccgttcccatttctcaagttatcatgtttcttttgataatacaattcatctctcaaacaaaatgtctacaaaacttaaatctgataatccatccgtagtattacaaaaagttggtgaaattacttttgaagatagaccagttcctgaaattactaaaccaaattatgttaaaattgcaattacaaatacaggtttatgtggttcggatgtccactactatgaaactggatcttgtggttcttttaaagttgaaaaaccaatggttttaggtcatgaatcttcaggaattattgtcgaagttggtagtgatgttaaaaccttaaaagcaggtgatagagttgcttgtgaacctggtattccttcaagattaagtcatcaatataaatcaggtaattataatttatgccctgaaatggaatttgccgcaactcctccttatgatggtactttatgtagatattacttattacctgaagattattgtgttaaattacctgatcatgtctcactcgaagaaggtgcattagttgaaccattatccgttgctgttcatgctaatagattgattgatgttaaatatggcgatacaatgatagtatttggtgctggtccaattggtttatttactgctggtgtcgcatccgctttcggttgtaataaagttttgattgttgatatagttcaagagaaattagattttgcaattcagaataaacttgcaactcatacatttaattctaagaataaatcttttgaacaattatcatcacacattaaatcaatttggggtgaaaataattatccaacttgtggtgctgatgcaactggtaataaattttgtactaatatgtgtattagatcgttagctaaaaaggggagatttgttcaagttggtatgagtggtgataatgttgatatgttcccaatttcttcagttatggaaagagaattgacagttaaaggtagtttccgttatagtgtcgatgattataaatatgctgttcagttattaaatgatagaaagattaatgttaaaccattgattactcatcgttttaaatttgaacaagcaattgaagcttatgaattctcaaaattaggtaaaagtattaagattatgattgaaggtcccaagctgtaattgatcatgatttatattgtatgcataattcattttacttttttctcttatttgggtttagtttctatattacacagggtattatatagttcaatatttacacgaaaacttcttaagttcaactattcatccttctttgcagcatcattttcagcaaataacttagaatgttgttcatcatgttttgctctgaaaaatgtatagtgtaaaacaacatcttcaatatttctcattgctggatctcttgaaaattcaggatcgataaagaaaaataatggcatatcaacttcttcaccttttgataatctttgttcctcaaaacaaaaacattgaatcttattaaaatatggtgcaacatgatctggtgtaactgaatatgttgccatacctgtaatatctttatcaccaacatttttagccttatagaatgctaatgcagtttcacctggaacaacccaaacttctctttgttgaggtacaaatttccatggtaatgcaccacttgtttcagcagtaaatgagattctcaaccttctctcagttgcaacaggtgataatttatctcttgtaaatctagttgcatcagtaattggtgtaccaccccatcccgtacgttgacaaatcattctataaattggaacactcgcatacgataatgctaaaaagatcatcatcattgataatgaataataaattgttgtttgtctatcatatttatccttctctccacgatattcctctctaagtctcttatattcttccagtgacatttttggtaattctgcacgtttagatcttggtgattcagtcatcttgttggatccagcacctggaacttcatatagtatacttcttgtattatggaaacttcttaattgattttgaattgtaaaattcatacctgctaatttattgaaattacttctttgaacgaatttcgggctttgatttaaacctcttgcaaaatttcttgcattaattattaccagtctattcatttctataatctataaatagtattacactggttactattgcttgatacaatttttgtgaagaaaagatactatatatccaaaatatttttattttcctgtaattttcactgattacagtttcggttttcattgattttctatagtgcgagaacatgtctttttttcaaaatgtcaccatgatgaatgaatcaacagataatcagccagttagagaagaatacataactgacaaaaaaaacatttacaataatcaacaaccgagttgttggaacaaatttaattcaaagattttgtgtataacattttgagcaaatttgcatcacaaaattataatgattttgattagttatataaattatttaaaaaaaattaatataatatctaaaagtcttcctcttgaagaaactgtaaaagttcttgttcacgttgacgtgcttcattatcatcatcaaatttttcacgaccagttgtcattggatatctcatagccttaacactatcattgtttaattgcatacagaatttaattctacgatcaaattctgcttgtggtgccttagtggtgtaaacatctgatacatctaaagattcaatatatccttttgtatgatttatagaaatatcaacaacgccatccttaattgcctttgcaacaatatattcagctgttaattcattatcaaggtgaagttttatacatatgtctttgagggaaatacgtttatatgataatgatatgattctaatacctgttttaatcacattttctcgtaaacgtaaaactaaattatagttcttatcattctttaaatgatcaccatatgtttttaaagcattgttgaatattttcaaatcacctaacctaacagccttggtaacttccgcatatggtcttagagatttaaataatattggatcatcaaattgtgataattctggtatttcacctgttaataattgaattaagatttgtaatttggtagctgattgaaggaaacctttggcatttttagtttgtgggcattttctaattgctgtaataatacattcgtttgctgatgagtagtctaattgaatagtttgaatttttgctaaatagtaatgatatcttgcaacaatagaagtagttgcttcatatggaaactcaattttttcaactaagttatatgcttgattaatatcatttgtaagaatataatttcttaataataaagttataactgaagctcttgtctcggtatcatgacttaaagttgcagttctcagtgcattcattaattctgctctaatattgattaaatcctttgcaatttcacttgatctaaaaatataataccaagctttagcttgtatgtaatctaaagttcttctattgtattttttcaatagctcaataacgtttttattaaaagcatacaatgctttaatttcaccaatatcatataaatatatttgaaccattaaatgaacaaaaacatcaatttcaggggaaacttcagtaactgtatgatcatctgaatccatatcaacatcagtatcagtttttgaaatctttttggaaaaaggggtcaatgcaccaacaagggtctcaacagttggaaatgttgtcggataagttttgttaataagatctaaaagatcatcagctttgatttctcttctaattgctgcatgttggcgaaagacacgcaaaacataacgtggatcaaacttgacaacagagttagttatcaatggcaaaaaagattctaattgttgtgaaacactttgttccttaatttcagtaattactggttcttcaacactagtcattgtctattgaagtgtgtggagtggcaaataaagtccttcctttaatctcatacaaattttgatgtggttactaaatttaaaagattcgccctcttgttaaattcaatgtaggaattttccagccgttacgtaatgaccgtcgcgccagtttcatctgctacataatcttaacaggattaagccaagggagggattgtataggttgattttctattgctatagatagacaaagtaactagatacatctaagtttggcaaatatgtctgacttgaatttagtgacacaagatatgaaagaattaactgaaaaattccaaaatcttggaagttcggttatttcaaaacaaagggaagaattagaaactcaacttcatgtatttcaagcagctttacttgcatttaagaatgaacatgtatcagaaattgtacaaaatgaagaggttagaactcagttttctgaaatttgtattgcatttggtattgatccattagttgtagcctcaagtttatcatcaaatacagataacaactccgaacgccgaagtcaattatgtttgaaaattatcgagatttgtgattccactagacatgttaatggtggtttaatattattaaaagatttacttgatttgataaatactgacacatgggtaaatcaggatttaaacttaaaatttacaacagatgatatctcagatgcattgaatcatttacaagttttaggaaatgaactcgaacttattaaaattgggaagcaccagtatgtcaaaaacataccccaagacttgaatacagatcaaagttccatattgaacactgctgatgtgctcggatatgtttccatctctatattacgtgataattttggatggaaaaaagtcagatgtaccgtggctattgatgaattagtttcaaatggtatattgtggctagatatcagagaaggtcacgaaactaaatattggattacatcttggataaacaaaaatctataaagttaataaagggattatgaaatatataatatacaaagttaactaagatgtgagatgtattggaatgcaaaatccacagtatcatattgactctcgttttgaatcaaaaagtcttcgttttgatctaacatatcatggtttatatgattccatgtagtagagtcaccatataacatagcagatggcttaattctttgctttccactagcatcacatcgtttacatttataagtatcatgagtctcacaaatagttttggtattaaattgaaataattgtttcaaattgtcactactaaaaagtctttccacatcatcaactgaatcaacaacacatgacgataattgcattttggcactctgtctctggaaaatcttttcttcaattgtacccgtggaaataaatctgtaaataaaacaatttttcttttgaccatctctccaaactctggctaatgcttgttgatcagatgctggattccaatcaggatccattaaaattaatctgttggcaccaatcaagttgataccacaaccaccagctttagaacttaacaaaaacacaaattcttttccatcgggtttgttgaatttatcaactaacttttgtctcttgctgatattcatagtaccatcaagtctcaaagatccgaatttatgttgtctgcaaagtttttcaaccaaatctaatgtttgtgtatagttagaaataacaacaattttatcatctgtttctctatcaatcttaaataaaaatctttcaagcatttgaaatttaccgctataccaagtttgaatttcacggtttctacccatactatttgtatcatctttataatcttctggaattaaactttcacacccttctatatcatcaggtaatgataacaagttaggatggttacacaatttttttaataatccaatagctttaagaggttgtgagttttccccctttagtaactttttgatatccggtgaggtgatgaagtaattgtacaattgtttttgcatatctgataatccacagaatatcacatattcgtacttcactggtaagtatttactcaagatatcattagttcttctgataatgaacttttggaccaattctgtcaattctttcaatttagcatcacccttctctttttctttatctgttgctaatgaatcacgtcctcttagaatatgtatttcatagtttttcctaaactcatttctatttcctaacaatcccggattggcaaagttcaataaggaaaaatattccgatagatcattttgaatcggagtaccagataaaataatacgtctttcacaattgatggaatttagagcattaaaggttaaactatcaccattctttaatctatgaccttcatcagcaagaactaaaccaacttcacaattatttaatttttcaatatttctacgaagtgtttcataactaataattaaaactggactcactataccattaccagttgcatctgcccaattttcaatagcatctccaatactggatcctttcgttgattttccatctatagccaatgagtttaatacaccaacacctaaccatttgtcaatttcatttgcccaatttctaaccaaactggatgggcaaacaacaatacacttttcaattgtctttttacctcttgggccctgtttcaaaagtgtccacattaatgttaaacattgtaacgttttacctaaacccatttcatctgccataatgcaacctttagcttttgggtgaactaaacctgcagtacatctatatagaaatcgcagaccttcacgttgatgtggtctcaaaattttagcaagcttaggatcaataacaactggaacgttgggaaatttagccattggatcttcagttttatctgatattcctaataattcattcaaagactttttgttgtatagtttaaacttagaaagcttttgtgtagatgtttcaaactcttcgataggagtaacatcctgtttcattgctttagctctagcctctgccagtgctttttcttcctcttctttgatttcgggtatcacatcaacagttggatcatataaaactattgctaaatcatcaaaggggtcaaataagggtcttggtgggaagaaaactttttttctatttcctagaggagggggatttttcattaaaatactttcatctttattctttaatggtatagtaaatttacgtgtcaggatcattctattttgatcaacatcacccaaaaccaaccttgggtgaagtgcattctttcttttcattgagttgttttgactataactattttcatcgaagtaagcttggtctttagcatttgaagcttgaatattttcgccttcagcgtaagttttaggtcctcttaatcttgcccttcgcactactcttccattggcagtgacattcgatgctccatttcctagtacatcccgagttgccggtcttgaaattggtggtttgaatggtttgaataacgcagaagggtcggtcaatgttcttctacgtttaagtgaagggttcaggcctgcacctgtacccagagcaactgaaacatattttggttctttaggtttatttttgtatctaccaaaatcagtttttcccatttaatttcaggttctcaaataagaaatgtaacgtatatgggtttttttaaagacggttatttaaataagtaaagataaaaaaaacacgtagaaaagatggattttgtaaatttgtattagctgaattttttgtaaacatgaaaacgcggtatggcacatcttcaccacttcctatttaagtaataatttcgatttgatactgatgtagtgaatgtaatattattgaactatataaaacaatgcaacaggtaatattatatacaagagaaattaataattaagaataatttcaacaataattgatacagtgactccaacaaaccacaaaaatatcatccagattccgacatatttatcacatctccatcctccaagaggtataaaaattaataatataacaacaagattgaacaaaagtccaattaaacataacgaaagtgatacacttgcaggtatttcaatctcgttatatcccatcagcaaaccatttaaccctaaaccaagaagaatgttcaataagtggtcctccaacacaagatgccaatgccattaaaggatatcccatcttagatatgacaattgaggaaattaaatcaccaactgaattacctaaagcaaataccgtaatacccatagctgatggtttaatataagttagagaagataacaatgtgaggatagatattacttctgacgcaatgatggaaatccatgaaattgaacacatcacacctagtacggaaatcccacattttattagaattgatgggtttgatgataaaattaaattttggtaagtaagataagtaaatccaatagttggtataattgatagaatcttccagatcaatgaaatatcaggaaagaacgttcgcatatataatgaaaggtgatagcagtaatgagaccagtagttcaacaagttttggaagtgaaggtttgtattcaccattatagtcagcttctgtcattattggtattgtatgagtgaagagtttcaagaacggtagtgtgaatatttcaagaattatttcaaaatgtgatttttgacgtggttcgattaattcagcgtgtatatcaccaatttcaatactatcgggattactatcttcactatctctgtaagtatttcctaacgtatctctataaattccaacttgtggtttgtttgtaatattggctaaaatggaagtgaattcaatattccttattacctgtggattataattgtatgaatcatctgggtttgaattgacttaaaagcatcataaagttattacttgctggattctcatcataaagagttctagcatgactgtcaattttggatttggcaattttgttgtcaaaataccattgccatgctatgatcaatgtaacatatgtaaagtacaatgagactaataaccacatttcaaatcttgttaaaacaccatctctaatacaatacaatagtaatatagatgcagcagtgaaaaagaaaacgtctctcaaatatgtacttttggcatttaaatcaatcaacttttcctcttccgttctctcatcagttgacataatttgactattttgtctattaaaaggtaacaaatcaaaaggcttaattatgaatataactccaatgacaacagtattgatgaaaaatgcagcaccgataatctcaccaaaagctaacgttgtattacccgttttgaatgatgtatacgttgatatgatatcaggagacccgttagcaaatgcaagtagtgttatcccggatacattttctggtattttcaagtatgatgttatagcattcaaattcggtacaagacagttacctgcaacaagtccgatggacccgaacaacaccaccaaaagtaatataagtaaaggtattccaatccaatggcgtgcggtatctgatttggctatacaataataaaccgtaaaagagttgataaatcctggataatcttgacattggttatgcacaaattcacactgttgtgcattcggaagcagatgaaccttttcacacgatagtattggtattgaactcatcatgtttcttgtaagtatgtattttttgtagatttttttgaagtaagtagttatgacttgctttgaatgatatactcacaaaaatatagctttatacgtttgataagcaggtacaataagacttcttccttgatagtaaaaaaaaagaattactaatgcaccagctccttcttttaatgccataatttttttgcaggggtatatataagaaagtcggaatttcaagcgattattttatttttaaagctcggggcaacaaaaaatgaaatcatcggatgcacgaatatttaatactggggatgaggaagagctttacgttatttcattcttttattttgaagttcttttctgtttgaatgatcaatcactcttcaaagagatttagatttttgggaactttatcaagtgtatttaaaatgaacgaaattttcaaaaccaaacctttgataattgacaatcatggaaaattacgagaaagagatacaggaaggatgttccatattcacggaattaactttgcctcaaatactaagcttcctacgttgccatcacaaaacactcatatgaatgtagataattgtggcttctatgagtcagctgatactatatcttttgttggaagaccattcccattaagtagtgcttacgaacatatttctaggatcaaacagtgtggttttaatactataagaatggtcactacatgggaaggcgattgaacatgaaggacctggaatttatgatgttgaatatgcagattatctgattcaattattgaaagtaattgaagagattggaggaatatacgttttcattgatccgcatcaagatgtctggtcaaggtttagtggtgggagtggtgcacctatatggactttatatgcagctggtcttgagcctaagaattttgaaaatacattagctgcaaaactacatcacttttcagctgaacctgaaaagttcacaaagatggtttgggcaacaaattataatagattagcctctaaagttatgttcacttgtttctttacaggaagtattttcactccgaatgcaattattgatgataagaatattcaaaactatttacaagatcattttattgatgcatacagtttccttattcatagaattaaagatcaagcacctgaaatatttggatcgtcttttctaggtgttgaaagtatgaatgaaccaaatggtgggtattttggatttggtgatttgaatgagctctcacacaatcaaaatctcaggttggatgaaactccatcaccaattcaagcattcagattaggtatgggatatccggagcaagttgatacatattctttatctataattggcccaactaaaaatggtaccaagtgggttgatccactgggaactaaagcatgggtgacaaatgatgataataaagataaacattatggatttaaaagatcttctcaatggagattgggggaatgtatatttgctcaacatggtgtttgggattcgcatactggtgaattgataaaacctgagtatttcaaagttcatccagaaactggagaatatttgaatgatgaaaaatttattaatggaccatttttaaagttttggcataaatttaagactagtatgagagaaattgatcaagatatgtttctgattttacaaccaccagttttagagattccaccgaaaattgcaaataatttggattaccttgatgataaaacgatgcttgcgttacactattatgacggtatgtctttgatgtttcaaaaatggaacagaattttaaatgttgatactttgggaattatgagaggtaaatatattaaccctatttttggattagtattaggtgaaaacaatattagaaagtcgattagaaaacaattaaaggaaatggctactgaaagccagaaaaatgtaggttatgatatcccggtaattttcacagaaaccggtatgccttttaatatggataacaaaagagcatatattgatgggaactatacacctcaacaagatgcaaatgatgcaatcttatcagcattagaaaacgaacaattgaactttacatattggtgttataatcctgaaaactgtcatgaatggggagacttgtggaacttagaagatttctctatcttttccaaggatgattttaagaatgatccatttaaggactacaataattatcatgattgggtggtgggtaatagtaagaaaattatcaccgaaatgcctaatagaattaattcattcaactatgctcctcatacaggaaactctaatgatacggactcaatacacagttataatcatacaaataatgatacccattccttatcatcggatagatcaatctctaatggatctatcaataaatctttactgcgtgagaatacacataagtacttacattttgaagaatcacatttagatttgacaaatggactaagagctaaaaatgccattattaggccagttcctgtattaattaatggtgaaatattggagtgtgaatttaatattcatacgaaaagatttcacttgaaggtaaactgtcatcgtcccaaatcaaactcattgcctgatattattgttatacccaaatatcactacgatgagaataagattaaaattgttgctacagaaggtacaactatgattaaaagaaatcaaatcacacaatggatagaatgggatcataatgatttaacaaatcgaaatattgctttaactatcacactgaaacattcaccaaatactgaaaacgataatgaattaggttgcagtggtttaaaaggcctggcctgtggatacttataaatatgttaatatcacttcacaaattcaattctatgataataggagaaatttttgattcatgtatctacaggcttggacactgtttaatatttattttacaattgatttttggtagtttggttgttatattggctgcatatttttgtcaaaatgaaaagaaggaaggtgattagggataaaagatcatcataatttaggtaataaaatgtttagtatttatatagaaataaataaataagtttaataatgaaaagggatagaaaaaacggggtggtattagtaatgatgctataataatttaactaatcaaacatatttaagtaagattcagcaacaaatctagctcttgcattcaagaataatttcatctcacttatttctttatcaacatcttccataaattcaatgatgaagtcaaccaacttttgtttcatcataagttcttgatgataattagttaataggaaactaatatcataaccttcaacgggtacccttcttaaaattaagaaattctctgctcttttagttaaaaatcttgtaaatttatcaactaaaatttcttcaatttcatcactttgtttaattttgattgatacacgtactgaattaattgatggttcaattaatacacgttcacttgcattacgtgatatatgtaatggatttaataagatttcaggtgaacgtttattttcaatttccggatagttatgacgttcaaccaattgagaactaaaatcttgtaaacatagggatgaattgagtgagtgacgtactgctgtaagatatggtttaagtgattgtgacattgatctatgatatactaatggggaaacacaagaacaattggccttcctgtaatggcttactgagactcagaaagctacattatcatggttctcttatagaattgcaagtgatggcatagcaaacggcgcgactgtttcatactctacacatgtgtaaaagttgttcaagagaagcattaagtgtaaacctgtattaagatattgtttctaactaatggagtggcaacgtgtggtggatgaagagagtggaaggccgtattactataatccaactgatgaaacaactcagtgggaatttccagaaagtttattagaaaatgtgctaaaaaagcacggatatattaaagctgcaacagatgaaggtcaagtgtatttctatagtgaacagatagacgagagtacttgggatgttccagtagatgttctcaaagagctacaggatattttaggagaagaagtgacagagaatgaaattaagggtgttcttccggaaactgaagcagaagaaaatgaaactgtggcagaagagccaaaacaggaagatattccagaggaagctaatcctaaggaagaaatgatggaagaggatgttgttgaaactgataatgctaaagataaccgaataaatcaaatacttggtatcgtggaaagtaatgaagatgttgagatgtcagaaacttctaataataaggactttgcacgggagtttgaggaaatgttggattcattagacattaaacctactcaaagtgttaaagatatacaaagtaaatgtttaagtgatcaaaggttttggaatgttgagtcaagtagtgaacgtaaaaaattgataaataaatttctagatgcaaaaatcatcgaagaacgaaataaacttagagaccattataaagaaattttcattgactcgttcaaactgaaagatgtcaaatattacacaagatatgaaacatacataaaaacttttaacaaagatgatgaaaaaagatatgcagaagtacctgttgatatgcgaaaagaagttttcaatgaatatgtcaataaactacgacagttacatgatatagaagtgaaagaagatttaatcaaacaacgtactataattgaaaaggaaatggaacatgatgttaaaattaatactcaattcatgaaaatactaccaatatacgagaagaaatttagcaatatgaccaaactggactttttggaagcattcagtaacgtgatcaaacgtcgagaaattgaacacgaaggagacatagaaaaggaaaaaaacgccaactacaaacatgataggaaagcacgtgaagcttttaaagaactgcttgaacagatgaaaatggatggtgagatagaatttacagctagaactaaatggtatgaatttgttttgaaattgaaggataaagctcaatttattgaacttgtgggacattctggttcttcaccaattgattatttttgggatagcttggatgctgaaaatgaaaaattaaaggctaaaataagtttcttcaagcaagaattagttaatttgaacttagatttcaattctgttaacaaaattgattttgttgaatacatgaaaaagagtgagaggtctgaaataaaggatataagcagtactgattatgaaactatttatgatataatgaaatcagagaatcaatcggcaactatatcccgtggtgttaagagagaacatgaaaacactaacaatgatgttaaaagacaacgtattttatttcgtaaaaattgataacatcgatttaagttaaagctttatatatatatatatatatatatatatatatatatttaaatctagaaacatctattaatcttggctaaacaatgccgatatagctaacgctgcaaacattgcatatttgaaatattgattttcagtaataagaattgtaatgtatccaacttttggaatataacctttaacattaccgataatttccttttctctattaagaaaggttttaccgtatccataaagtggtaaatcatctctttcattattatcacctttagttaaaagatattgagtttttttagaagtttctaaagtttttgcttttttagatttggatattggttcttctactacatgttgatgtaccactctatgaacaattggtatagatctttgaggtgcattgtagacaacaatatctccaacatcaacataagtttctctattccaaaggaaaagaatatcaccacgttgaaatgctggttccattgaacctgaaaggacaacaaccaatggagatggtgaatttgtgatgacagcgagacctttccagattgcaaaagcactggtgacaaccattgccattgtcaatatattatgtaactgtacacgtaatgatttgagattcattgtctgtttgattgtctgttaaagaatacgatatatacctataggagttttaacatagtggtgatctggccttatgggtttattatagcagcagctactaacaattttcaccgggtatcgcgtttgtttaaattttgacatgttgtgagacgacaccttaatctttcatgatcttctcttttgtgtttttgcagggagaaacattataacattatatctatacagttatacatcagatatgagtacaagtagatattctgcaaaggcacatcaaagagatagacaaacattgtttacatctgaagatttacaacgatcggcatcaggatcaccaattcctaattatacaaacaatagtataccaatttctaatccatatgagagatcacgattgccaaatttttcaactaaagcagctgaaatggcaatgcttgaatcccaatctgatgatacaatgaatgaaatgaaatataaattaggtgcattaaaggatttatcaattgcaatgggtgatcaaattaataaatcaaaaaatacactcggtgatttagccgaagatatgggtatgtcaagtgaaagaatttctgataatatgaatcgtatgcgtagatttgtagaacaaggtggtgttggctggaaagtttgggcaggttttacagttataatattatggttctttgtatgggtttggttattttaaactcgttaatcttaaattatgtgtattaaatattaagggttttgtaaaataaatttagaactccattgattaattaataaatctttactattctttaactcatatattattactattacattatagtgataagatttttgtattttgttttctgttaaaaaaagctataataaaaagaacttgctaaatatactaattattcaagagtaataaaggttaattatagacaccaactcttgaagatggtgttatataatgataatcatcaatcactaatttattaggattgctattaatataagattgatcattcttttcaatacctataccacctctattacctctgctacctctgctacctctgctacctctgctacctctgctacccatataacctctactacctctaccacgacctctaacgctggaacctctggctctgccacggaaaattcctctacctattcctctacctctacccctacctcttcctctacctctgttgttataattgtgactataagtttcgttatcaccagaactataagttgatatattatcatttacgttcccaccttccaatacgctaacatcatcattcaaacttttattgctaccatcaccatttaaacttggaacactaacatcattatccaaacttgaactactaccatcattatttaaacttgatccgctaccatcaccctttatctcatcagagctactattttgatttgagcttttatcaatttcaccaaaataaccatcgtcatcttcactacttgaaggttgattaacagttattttattataattaaatggtgatatatctcttatattcttattattagtattattattattattataataataaggtttaccatatttattaaatttcatatagttaaagttgctatttctgtgtattttattgttaaagttatcattattatcattattattatatttattgttaatttgaccatgaaccattccattgccgtaattatttatattattgttacccatatatttattatcattattgttatcattattgttattattattattaaatctattattgttatccctatgttgttcattgctattgtttacattagtgttatttatatttacattattgttatcattataattatagttattatttttattattgtcaattttattattttcaaaatttggtacgttagttcttttcttttcaacgccaattattctaccagctacttccatattattgaattttaaagatttctcaacgagacttggatccgataattcaatataagcaaaaccttttggtaaaccagtgtatctatcacaaataatagttacacgatttacactatttttaccacaaccttcaatatgatcaataccattacaaaatatttcctttaatttccaaggagaaattttgaatggtaaatttgatacataaattgattgattatcaatatcacgttgatttctcggttgatgagaacctaattctaaattatcaaaatcttcagttatattttgtagagcatttgaagaatctgtaattgaattcaagttttcatttgtatttgaatttgtatttgtatttgtatttgtatttgtatttgtatcatttaaaatctttttagcatgaggtagtggtattgattcttgggaggtgatacttctattagttgttgatagattattatcatttgaactaaaatccgaattataattttcagtatttgaaatacttgaggagtttgttgaaccattactattaacagtattgctattattgatattactattgctattgttgttattaattgaataattatcagatggaatatttaacttatagttgaaatcattaaagtgattatttaaactcatagtttgactgtttaaaatttatttattgattagtttattatgtgaataaaagctacaagattaaccttatcgattgaatgtatagttatcaaatacagatatagtgattatttatatgatatattaatgaattatatctaatctattttgaaattactgtgaactgcccttaaatgaaggaacttcttgctatccagtggaattgaaacttataggaaaggaaattctttactctttttctttcttactttttcaacagtaaattaaagttacaatataaaatataaatacagtaataaaactgaaatttaatttttgttgtactctacctatttcatagaataagttaactaaatcaacgagaatagccaagtatttaaggtgatgagaagtataaaatgcacaaccaaatcaagaaaacaatcataatacagaaatttcatgagactataattaacatttagggcgggttgtggaagaaaatggaagttattttcaacaaagtttcaaataattccgtcggtaagtcgtatatactataatgctataaattatgataatcttatcatagctcctttgatacactatagagatctaaatagttctatatcaaaattttagatattagtacataaatctgatgataaggtgtatttatcactagagggggggtgggaatggcataaatagataaaaatttccaataatgtggataacctggtattaaatagagtggacagcacacatgaacaaaccgacgggaataaaacttccatgacattctttctcttatcgttttaaacctaaatgcaattatgtcatacaatttcttggtattatatcaacaattcctatggatattgagtaatcaacttattgtttctacggatattctattccatcacaattcaacaggagatatttatacattacctcggtattttatttgcgttacttagacgatgagttaggagggaaaggatctttgggattggtatattatcatttgtgctactaataaatttaatttaattttacccagcatataatagtctcatcgacctttggaagtcgcgtctattatggctttacattttttattacgtaataatttttttcttatgtgttgcagtgaaataatttttttttaaacagtgctatactaaagaaatttgatagaaaaaaaaattttattgtaccaaaagaatgaaaaattattttttattgaacttatactatactacatcatattatcaaaacattcatttaatagccaataaattataaaataaacaatggtatctgtaaggaagagaaagatgaaccgttctggtgtttctaaaaacagacggaaaaataataataaatcaaaattcaatccaaagagtaatccagttattgcaaaacattgggatccttcattaactgcgaagcaaaactataaaaaattaggtttaacattgcgattaagctgctgcatctggtggtgaagaaaagaaaataagaatcaaaccaattcatcatggtaatatggaagaaagtttatttgatgatgatgatgaaaaagaggatgaaggttaaagaagatgaagaagaattagatccttatgatccagctaatattcttgaaggtactgcaaaatttatgagagatgatgaaggtaaaggttattaaaatcatatatggtactaagaagataactaaaattagtgaaaataatgatgatttaaagaatgatgaaaatagtgatgaatcagatgatgatgaatccgatgatgaccaatctgaagctaaacaagtgatagcagaacttgaacaacttgcaagtattccaaagaagaaagaagttattaaaatgaatgaagttgaaatttcaagatatagtaaattaattgcaaaatatggtgaagattatgaaaagatgaaatgggataaaaaattaaatcctttccaattaagtcctggtcaacttcgaaaacaaattaagaagtatcttcaatatcatgctaaccaagagtaatcctgtatactatactaaataaattgacatacttataaatcgataaaatcctgaatattaaattattatcgcttacatatatatatatgataatcattttcttttactttgatacatgtacctctcttaatcaatctcctttaacatcgatgtcagaaacaacaagagattctaaactcaattggacaaaacatatagccaatacccctgaacaaaacatacagacattctcctctaaaacttcacaaatggcaactctccaatctcagaagtttgaacacattagaacaaagctctataatgatattcatggagtggcgcagttgtccaaaaaagcggctggtgttgtggaaacttctgaaaaattaaaagatttaaacaaagaactagatttctttaaataattagaaattgtgtctataacatgtacacttctctctttctatcttcttgctttaaatatatcaatcttttatactctttaaacaaagaattatgctttctagactatcgcttaaaagtaatataagttcttcaattagaaattatacaacgaaaatctgctataactccaacaattattgaaaaattaccaaatggaattaaagttgtaattgacccaactccatcatatttttcagctgttggattttatgtaactgccggtagtagatatgaaaaaacttatggattaacaggttgttcacatattttagataaattatcatataaatcaactgaaaattttacagcaaaggaaatgaatgattcattaaataagttaggtggtaattatatgtgttcatcatcaagagaggcaatgatttatcaagcaagtgttttcaataatgatattgatagaatgtttcatttattaagtgaaactgttacaaagccaaaattaacaaatgatgaaataaatgaacaattattatctgctgaatacgaattaagtgaaatttggactcaaagtgatttacttttacctgaaatcttccaacaagttgcatattcaaattcaaatttaggtaatccattattatgtccaattgataatttaaataaaattagtagaaatgatttaattaaatatagagacattttctataatccagaaaatttagttattgcattttcaggtgttgaagagacaaaggcaatgaaattaattgaaaaatatttaagtgattttaaatctaaaaataatgaaaaaattattaaagagcctgcattatatacaggtggagaattttcattaccaattccaaatggtatggaatatagaggtgaagaatttcataatatttacgttggatttgaaggtttgaatattgaagataaagatatttatagattagcagttttacaaatgttaatgggtagtggaggatcattcagtgcgggtggaccaggtaaaggtatgtattcaagagcatatacaagaattttaaatcaatttggttttattgaaagttgtaaaagttttattcataattatactgatagtggattatttggaatttcactttcatgtgtaccacaagctgatagagttatggcagaaataattgcaagtgaattacgtacattaatgagttatgatattggacaaggtggtatatcagaacaagaattatcaagatcaaaaaatcaattaaagagtagtttaatgatgaatttagagagtaaaatggttcaattagaggatatgggtagacaagttcaaatttatgataaaagaattgatgttacagaaatgtgtgaaaaaattgatagtgttaatagacatgatataattggtgttgcgcatgatattttaggaaggacagaaccaacaattgtcgttcaaggtgatagagaagcctttggtgatatccaaggtatgttaaaaaaatatggtattgggaaaataactgatgataataaacctagaagtaaaaaatggttttctgcatagatagattataaggagaaaaaagaagaagaaaatttatacatctttgtaaatagttttaaattaatatagtgaataaaataaacttagatattccgaccacgatgttttttgcttttgttttttacttagaaaatattcgatataaatatacaaggaaagtagagtatggtaaagtaatgaaagttatatagactcaaaatgttatctataattcagagaactggagaaaatacatgcaagaggtattgagtgttaaataaacacgactattaatttttcttttcgtagacatcttcttcatgtaaataagtatggaagactctatcccagaacattgaagtaacaccaaaacctaatctataatttttataatgatgttctaaatgatatttctttaatttttgaacgtatgaaggtaaattcttatgatgtaagaaataatgagtacaatcatacatgatataacctaagaaaccacctgcccaaccagcacaagcaagataaaatgggaagattccaaaaatcaacttatagaatgggaaagctaagacaatgaataatgttggtggcataactaatcttaatctatccattggtaaataatgatgaacaccatgcattaggaaatgtaaggtaaatgcaatattattttcaggtaaattatcatctaaatggaataagaatctatgcatacaatattcaattaatgtccaaacaaataaacctaaacaccaaaataagagagtaacgacgggatgtaaatgagatgcaccaatataaagaatgtaaaaatcaagaggtaaccaaacagatggaacaacccaccatggagttaatgataatggttcaaggaaattaccaaataattgagctgaacctttaccataatgtcttggtctatgaatttgatcaatatagaaatctctagtccaatttgcacgtaaaacttgcataataagaggtttatctaaatctaagaatttatgtttcttataatcatcactatgatctgttttcaaatgtaataaatcatctggaatatcaccaaaactagttagatcagcaactcttaaaccatctgaatcatattcaggttttaatttgatatctttatgttttgttaataattcttcttcctcttcaggtgttgctaaataaccgactaacatatcatcatctaacatttcataagcactttcggaatgaatgtgagaatctggacttgcaagaatttcagtaatatctttacctgcataatccataataagttcaggacctgcaggatgttcctctaagaatgacgtgacatcgtaaactttacgattatagagagtaacccaaactgatttttcagtgttgtgagactcaacggtagatttggcaaataatgggagggatgacattgcctttatgatttaagtagaataagtagatgaaaggaaagtgaaagaaacaaagttagaataatgttagaaacaatataaaaagggaagacacggtataaataaatataatacgcttaaattatcacccaacaggcttataataatattatcattaataataataataataacaaacagaatcgatctcgttccctctctctttatattagctgattttttactttttcactataaaattttcacctgtttaaaagaaaaggaatttttcgtttctttttcccgcgtttttttatgagtgttgatctttttttttggaatgtatctggtcactttgtggtacatgcatgcgtcttttatggggttgcgcttctgagaccttctagcacgattctccatccatggcgcatacaacaccagtttgcatgttccccttcaaggtcaatcccatcatcatcaggatcagtctcgtcaaattcagttaattcctcactggctggtatctctgctctatgtggacatggtgggagttcctcaactccatgtacgtcgcctggatcatcgtctgaatctgatgaggtattgagaagaattctacgtgtacatccctcgcatttcaaaagtagaaatctagtctggtggaatttttgtaactttaaatcccatcctaataacgctggtaaaattacatcaatattgggaaaaatacgcatatctgtacttaatgtctcgttaccatctatatcaatatcaatatcaatatcaatatcaatgttcatatcttcatcagttgtaatgttttgtaaatattgtaatagaaatgtcttttcatctttactcaaaaattgtgttttaaaattacgtccaatcaatttatgtctatgtttccttaaaatatccaaccttccttgaaatttaatcaattctcttgacatatcctttggtgacaaataatagttctcatcctttggagttaatggtaataatggtaaaaatgtacacgttggataatgatctgttgataatctcgttacatatgaattaacaagcgtttcataaacatgtatatcatcatcctcttcttcatcatcatccaattcatcatctaaaaatcgatattcaaattgtaattcatatttatcgttattattagcaaagatttcgttataataatgatcatcatcatgatgattattgaagagttttttagttgaattttctctaacattttcatcatattcctttaattcgggtaatttaactattatacctgaatgacatgatgtacaatgaagttcattcttcctcactgggtgacatttccatccctgtgtagcacatattaatggtgttaatttactattttcattagtccaattgaaaactgaaaaactattgattcttttaatcaaattacttctcgataatggtgacggtatgtatctaactgttggtattttattaggtcctctaagataaaccaattgttttttatgctttaaatcattattattaatattattatcactgttgccattattgaaaccatcaaatgatgatgacgatgatgataatcttcttttggggattatagatttaggtaatgaatggaaatgctgtaatggtggtttattactctgtgatatcgaaatttgctgtagaatattaagtattgcactagctgttgaagatactgcctcttcatctatgttaacatgatcatctaccattgtatcattattgtatgacatttgaacgggtgtaagatgttgaaacagatcaataaataaaatatacggtacaataatattatagaaaatgacccacagattattaaataaaacttgatgcatcaagatttttttttatgagtctttcaacaaattctcttaactttaatatttttttttcttttaacttcgtatctttctgtttccttttggagttccctataatagcaaaaaatgagttacaaagaaaacttccttcaagctgcattagatgctgaagctcttaaatttggtacttttacccttaaaagtggtagaatctcaccatatttctttaacatgggtttattcaatactgctaaaactttaagtactttagctgaagcttatgctcgtgctatcattgattcaggtcttgaatttgatatcttgtttggtcctgcatataaaggtattccattagctgctattacagttaccaaattatatgaaattggtggtgaaaaatattcaaatattggttattcttttaatagaaaggaaaagaaagatcatggtgaaggtggttcaattgttggttgtgcattaaaggataaaaaaatattaattattgatgatgttatgactgcaggtactgctattaatgaagcttttggtatcatttctgctgaaggtggtaataccgttgcttgtattattgcacttgatagaatggaaactactaaagattcaaatgaatgtgcaactaaaattgtttcaaagagatataatgttcctgttctttcaatcgtctcatttgatgatatagttgaagtcttaaaggagaaattaacatctgagcaaatgaacagtattatggaatacagaaaacagtatgttccttcaaactaatcctttgaatagagtatttactttgattatttaatataatattacaattactacaatataatttatgtttcctttaaaattttttattagtatatttcttacggttataaaattacatgaacaaattccccttaaccctaacctctaattctttggattttttgcttaatcttcttaggttcaataggtttttcatttgtctcatttggtgtttttatatatgcacctgcagtttctggattcttcattgtaaggaaggaatgcataggaacaatagtgttcattctgaaacctttgactttaggaattttagttggttcccaattaccttccattaattctggtggacctggtaaatctttaacattctttaatgtagttgggtttttctttaaatattcagcaatagccatcaatgcttcatgtttagattttaacattggatgagttgatttaccttcatattttatacccaatctaactctacctggattaccccaatcttgtggatgtgtcttttctggttcaaaaactgctggaattcttaataatttacatgcatctaatatagtctttgctaatggattttcaacacattctgatttaggtaaccttcttccttctttcgtacttctattcttatcaaaataacatgggtacactatttgcattgccttaaactctttacgttgttctggggtcatactatcatacattgtcatatttggattttgagcttttctctctgcatttgcttgtgctgccttttcagccatctttttaaaatccatatccatacccatacctttgaacatatcagcagctggaaataatggtggttctgaatcttgtgatctggtaacttgaggtttaggttttgctggtgcaacaggtgtgactaaatctggatcaaattcagctaaatccatatcaagattgtcgatatcctccacatcctctatttcttctagctttggcatcttggagtgtattatctattagttaaataaaataaattgtaaactaataaatacaaaaccaaatcgtcgacagtactgaagaaatgtacgaaattgaaatttaccagttccaacactttttgatgcgactatctccaatttcatgtcaatcttttttttcttcttctttctgttatagaaatctttttttttgaatttttttatctagtttttaaggtcatactggtaattcaagattaacatattgagtggtattttgattaggtataatgaaaaattatgaagaaccagatcgaaatcatatagaagacaaaccggaaaaatacgacattactagaagaacttcacgtagaagaacgaaaccagtagattatactgaatactttaagtatgctgaacatattcctgatgatgagtcagatattatagatgaaaatgatgttgatgaggtggataattcagatgaatctgaaagtgtaacgggaagtgatagtgatattgaaattacagcagtaaaacacacgaaaaaggttgtaaaacgtgaatctcctaaacatatgagaactgatgtgttgggatggaataataatcttttagaaaatgacagtttaaatatggaacagatatataaaaagtatttgtccaatttcaatcaaaagttgttacctttacagcagcatcaaaaactgacaaaggattttcaacattattccgacttactgatagatataaatacggaatttaccaaagacttaccattacatttatacactgcacatcttttgtcaactaaaaatcttcatttaccaccaaaagattttacgtcgtggccatctccaagttcgaaactgataccacctcggtcatacattaagtaccacagactttcaatctttaaatattttacccagcagagatttcgaaatgataaataattccaaatatgtaaatattgattacaggcctaattatggtcctaaattacgtgttcccactcactccatgttggaatattggcatccgcagataaattcaggtgaggaaatacgacaatgcattgactctttatatgagaagaaaattaacacccaaatacagcaatactctgtaatctaagaaaatcagaaaaaatggtaaactatcaaaatatacatatcaacgtagggttccagaagatttacatttagatgataaactaacggataaaattgttgagagactagatgaagttattgataaattaatatccatcaatacagaaaaggttgaaaaattggaaaacaataaaaaaccaggagtagattacacaacgtttaatattgattggttatccgtgatgtcatcccttggtactaacgaatacaataaaaagatgaaaacatttttattgaaattattcaatttgaaattagaaaaagataaatttaatgggccattacaaaacattttggtaagatcacaacagtttactgaatcaagaaaccttagaaacaaagttttaaaaagagcaatcactacaacacaaaagaaaaatagcaaatcaagtgggtttaaagagtcccttaaagttttcaaacaaagcaaaaaacaaaagtcaaacatacgcaatcatttagatgattttatgaagctaagtattgtacctttcaaatacgatgactataattcctaattatacatcaaataaatatatacccaatttatagatttcatagataagcatgcatctttaatctgcaatttcaggaaatagtgaaacaaatatttcatcaagtattgataaaactaaatggcaatttaatatttcactttgtaagcacatatacaacgtatcagcagcatcagaactagctgcttgaccaaaaattttagatgtagtatcaataatgtaatcatgtaaaagtttattagcttcttgatttgtaaggtgtttctcgtgtaaagttctaggttttctgcttttacgaaagtttccatcaggccataaggtaagttgtaaacttgtaagtattgtagaaacagtttcttcatttctcaatttaccatcaatatttgatcttataatcttttcagctgtggaaccaaacacttgttggaataaaagaactaaagcttttcctctgatccaactagctgagctatttaaatggaacacggtaactatcaaactgcaaatgggtttaataaatgacatgtctctcaatttcaaacttgctttttcactttcatctgttatttgaattgtttgatctgcatcttcttcattattctcatcatcaatctttttggatgaattatactctggtgttaattctctcaaattagagagtgataagagtgggtataatgcttgagtggagataagattatatagttttgttccagaaacatcaatttcatcatttttgctattattgtatgtaatgtcaaaatgttcacttgataaaaattctctaaatactctatctgagcaaactttcttactttgaatcaattgttgaatataaatttctaacttttttcttctttcttccacaatggtaccttgaatgaacttgatgacaatattcttttttgggaactctaactcagatacttcaggataagtggatttcaaataattatgcaaatcatagaattgagtgaaccttctggttaccatccaagttgttgcaggattcttatttgaagatttttctacattaataacataaactacgtaacttttcccattttcatctttagatgaaatacactctggtattgtaacagaagaattggagtataaactattttcactatcttggacaatatattgttcttttctcaatgtttttcaattttatctctttttctaaacttaaaagtgactttcgtaaaatacgagattcaggaatattattgataacttctgccttcttcaacaaagttttaataattagtttttgtttttctaatcgtttcagttcggaatcaagtctctcgatttcacaggatatattttgaacatcaaatgatgattttctatcatcattttcaatgctatattctgataagctagaatctgtgtcgtcatcaattgaggtagctttgaaaacgtcaaacttgccagttgaatcaatttcttctcccacttcattaacttttgcggtatcttcttcgttttttagatcatcatccgctgttccaaatagatcttttgcaagatcttcactgattagtctagagtttcttttatctgttagatcatttaattttttcacttcctgcgcctttatatcttcattcataatctcgttaagtgcatcttcaactgctttgacgaccgtatcactaattttacctgtagtattcacatcaatataattctttccatcttcattatcatcataagtagataaaggatcttcagctgagggatcgaaaattcttttgtttagttttttctgtttttgctgatgaagctatatccggcactacaccagcaatagtttcagtgttcagatatgttttacttttccgtagtaacatttcttcaactagtaattctatccataaatttgatgctttaaatgcaataaaatcactctttttcattcttgcaaattcaaagtcttggagttttaaaatgcattttttagcacgtgaataaccagtctggctggtacaatttccttctataaattcactaactttgtaatacaattttggtggtattttcattactggattatcaaagtatttttcaaaaatttgtttaatttcatctgatcgatttggctgtaatccagaaaatgaatcgtttgcatcttcaacttcttcgtcatctgtcttcacaagatcaatatcgtcttcaatttcatcatcgctgttttggttaacgctatatctttttttcaagtctaaaggatttctcaaactttcagcagcaatccaaaaatctaaaagagttttacgatcatctctttgttgcatataaacctgaaaatactccacgtcttaatgctgatgataaaacctcagtgaatgaatgatcaatcatatctcctttaatatcttcttcctctgatatcaatggaaaagttgattgttttctagtcttcacttttgaaaattcactattgtttaactttgaattgattttcttaatgacggcattacaacgtttggaatacgaagtgaaaggtttcgaatcttcggttaataggtttgggtacactttagctattcgttcatttcgaaacaataagtgatatttaaatctcaataggtcattttcattttgtgacttctctatagcctctaaaatcatggcatattcttgcttagttgtcttcattgtaagttccaaacctaaaagattgttgtcacctttattctttgctaaagcagagctagaagagtttagggagtgtctatgtaatatatttcgaagtttcttcacctcatttctttccttcatttgtttggatataaaattgactatcatttgattataataatcgctatctgataacattgagcagataggactcaacacaaatgataaaacaagttctcgtacaagtatacgagctggatttgatttgcattcattatcctctaataaataaggtaatattttgtcaatcaattcacttagatatactgttaatattttctaacggctcttctgattttattttgattcctttgtgtaaatgtcctctattataatttgaggctaaaagatagttgttacctagtttattcgtatttcctgttaatttggtactcctaattacttcatgagcggtaattatcttatctatgtgatcattaatcaatggtattaatctatgaactaataagttcgatatatcgagtccaacaactctactttctaaagtcctgaaaatgaatctaaattcatgtttgatagaaagcaaaaatgatttattgctgcttatctttttaaaccaagactcaacaaaatcacgtaatattaaatcaattatattgtttacagtatcgttaatgacaaaattatcagggtataactgtctatcttcattttcatgcaataatttatcattgaatgattcaagtctttcaggccaatttttgtttctatagaaagagtatttctgtcctctttccttgagatacgctaattcatcaaaagaatctagttgaaaatatacacttatcaaaagtatcaataatgtaaataagaaaaagattccggctaatatgaagactggtttgaacaatttgatataaattggaacaacaaaaagtaatattcctatcccaatcacaaacttttgaagcatgtgtgtagaaaaggttcctcctaagttatatacaatgggttattgttttttaaaaggaacaagaacaactagatcttttgaataaatgggatgtatcccaggttttaatagaccgcgtttcgaaattcatgtcaaccgttaaaagttgatctatcacaagttataattcttctagaaattacaaaaaaatttacttgtaggatatatataggttcatgatatattatgcagttaaaaaatgttaaagataacacagacaaagttagaaaaatagtaaaaatagtaaaaatagtaaaatagtaaaaatagtaaaaaaagtaaaaataaacgttgaattcaagacttagctggtctcctcttcttcattttctttatttctttgaataacagctttcctgatcttgtcactcaatgaattggcatttacaccagtagataatgaatcagcagttattggaatatgttcaacactagaagagttagatgcggtagctgtatcgggcatttgaagttgatctggaaaaatagaaacatgagctaagtttggtaacttaccattatcattttcaccatcgaaattagaaaatcctgagtagtttgaacttgatctactcaatggtggaagagagtttggtcttgatgttgatctggatctagaacgtgatcttgatctggatctggattcaatttcttctttttcagcttcaacttgttcggacagtttatgaatgtgaacttcattgaatttcttgaaaaccttaggacctaattcattaataacttcagtaacttcaatagaaagttttttacgttcctcctttaattcatttaattgcttagatgatgaatgtaaggacagtaaaaggggatcgatagatttgtaaatatccatgccaacttctcccatcttcaatgcagaataagtagtaccaactaatagagcccatgttccacagaaaataacaaatagtccaataactgaattgcttaatgaagggaacagtgagtaacgataaacaatataaagacctaaagttgaatatgtgaaataacaaacaggtgcaaagaataatgcaataagaactttccaagaagctaaaacatcagttgcattaatcttaacaacagatttagcaagcgctaatttttgtttcttttttgaaatgacagaacaaacaataaaaataggtgcaaataaaatggtacctggtaaacttaaaattgagtaaaaagtcaaagagacaactctgtttaaaagcaagcataatgtttttaatttgttatcagttgcagtttcaagttgatgatctttaataccaaaagttcttaatttcttattatatgcaaggacagattctttcaaatgtataattcttggatcatctttaaatttactataaccagttaacagatttctattcatttcaacaacaacaggtaaaggtggacgtttgaaacgaccgtatgagtataatcttctagcagcttgaatgacttgtaaagtttgataatctggagcttgagttgtaacaaaattcatagcatcggtaatttctttcattaatttattaactgcctttcttgaatcttgtttatattcttcacctctttccttagtcaaaacaattggattaccatattcaacaacagctcttgatctaaacttatgaggatggaaatagtttaacccacatggaacaattgtaacttcggtatcaggatacttagcaattgcacctaatgccattaatgcaaccccgggtttaaattccattaattcgggacgatcatgtgaaccaccttctggtgcaataccaatacatttaccgtcgtgtaatgcatccaaaaactttatcaaataattcatgattatcaattcttggagcaactgaatatttggtgcctttaataagagcatcaatacctctttgctttttcattgaagttgctaatctaagttttgtatcactaataatttcaccaattttaacattaccaccattatttggtatacctattagccctttactaacagcaatctttagtgaaatgggtatttgtaccattaattgtaagttcatcctctggataattttcaaatttaatagttccctctttagattgcagtaaatcttgaggtctttcaactggtatagcaccagaccatctactccaaatacccatccatttactgtaatatgatgaggcagcctcaatcataaagatttgtctattagtcacggtatgagcagcatgaattgaaattgcagcatctaaatattgatttgcatggggtgcaatgaccaccattgtaggacctgttgctgggaaattaaaggaccctctaacagaaacttctctgaaaaagatatcaataatgatctggagaaaccagtcaagcatctcaagtacaagattcgccatctctacctatgtatgttgtaataataagtatacttcactacagatattgaggtaaactgtcactaaaccgttgccataataaacttaaccgagtggatcgataaaaaataaatttcaagaaaaatcaacttctccacgaaattaatttatttttttcaatttttcaaattttctctctgaggtgacccaatgatgttaacactggcaatttcactttcaaccctttcactgagtcgatatatttccatttatcttctctttattggttaaatataccctctctcagttaataatatgcgtttacgatatatggattggtctcatacgctttgcttgatcatactgctcaatcttttggggttctcagtttcaatagactctcaatctgcgcaggtcattacaaacaatttttcggaagatagtgatagtgatataaagagaaataaagaactagttgttaaaaatgcctatgactataatattgaaggtactgatgtattgagtaatcattttggtgctgcatatccgaatttaaatgatgtatcatttaatggacctaataaccaactaaaagatttccaaattacaaatcttatattaacctcggatatagaaggaaatatcaatgcagttaatcgacgaactggggaattattatggtccttggttggtggtcaaccgttggtggatgtacagtccgaaaagaaattgaaaacttatccatcacctacacctgtaggatcatattcggtgaacacatcaagtgctgggaaaatatttgaaaataataacataaatgtatataccagtgatgataaagtaacaaataatgatagagcttcaactaggaaaaataactttaaaaatgaaattacttggatagtagaaccgtttaatgatggtgcagtgtatcatttcactggtaatgaaggattagaaaaattgccattatcagttaaagaattcgttctgaattcaccattttcagtcaatgatcaatttgtttatactggtactagaatgtcaggtattgtgaaagttgatgcttataccggtgaaattgtagagacatatggattggatgatgtaggtgtttgtccagctgatggagaattttatgaagatattcatgatgatgagaacacaaatgataatgaaatagaacttaatacaatagatcataaaattgaacaatcaaatagaaagaatggatcagtgataactttaggtaaaactatctatgatctcacgattcattcaaaaaacaatacatcctggaatataacttatgttcaatggggaccaaataatttgcattcaaatttgttgccacaaaattgtgattcaattgatgatatttatatacagccatatcatgataacacattattagctttagatattaacaccaaatcaatcaaatgggtttccaatttaccatttgtaactatcaatgtttttgatgtatttttaaatccattaagtgaatctaatgattatattattttacctcatcctctagataaacaagataactcgccccctaaaacaaatgaggctacatatttagatagaaccaaatcaggttcatggtatgcaatgagtgaaaatcattatccttcgcttgttagaagtgcaccattggctaaatatatcaccaatgaaagatggagaatgccatcaatttttgcaaatgaagatttattagaaatttcaatatctggtgttcatgataattcattgaaaaaagattccaatgaacgtaataaaaagaaattagcaaattcaaacacagtagaaaattatttggctgtatatcaatcagctacacctgtgccagtttatggatataatggtgataaaatgcaaaaagttccacattatcttagtaataatattaataataatgatatcaacgggtatgacaattacatgtatcatcaacatctgcaaaatcaacaacgagttctagaaattggaacaaattcacccacgatgacatttaataaatcctcattcacgaatattctatttagagcatttgaaaacgtttttgttgcactgatatgtttgggtgttttctatgtattgtctaaactaggtgttctatcatcaatagggataacccagaaaaatgtgcaagaaaacgaatatatatcatctgaaaaacaaattattatcgaaacaaacacggatgaaccaaattcttcaactaataatgaatctattatcagctcagctatatcagatattgaagacccaaataatataccccataataaagataacagtaatgacacaaaaaaagatacaaaattggaaaatccagttgacaatcataatttaaatagtgaacttgatattgataatgatgaacttggcaaaagaaaacgtaaaagaggaactcgtggtggtaaaaagaataagaagaaagatttggaaatggcatcaactaataaaaccgcaaattctgatagtaacctattgactatgcaaaaccatacggaaaatgaacttgatgcttattctgattccgctgttgttacaattaacaaaaaatatgatgatgaacacattactgaaatcagtaataatttggtaattacagatagtattttaggtttcggatctcatggtactattgtattcaagggatattttgaaaatagaccagttgctgtcaagagaatgcttcttgaattctatgatgttgcatcacttgagatacatttattacaagaaagtgatgatcactccaatgttgttagatatttttgctcgcaggaaaagaacaaatttttgtacattgctttggagttatgttctgcatctttaggagatataattgaaaacaaaaaagatattggtgtcaaaagtgaagataaagaaattttatatcaaatttccaatggtgttgatcatttacattccttgaatattgttcatagagatattaaacctcaaaatattttagttgctgtctctaaaaagaattctaaatcagcaagcaatgatgttagatatttaatttcggattttggactttgtaaaaaattagatgcagaccaatcatcattcaaaggaacaactgccaatgctgctggaacatctggttggcgtgcgccggaattactcaatgatttatcaccagcttatatgaaacaaaatgttaaaaatagagtcagattaaccaaatctgttgatattttttcaactggttgtgtatttttctatgttttaactaaaggttatcatcctttcggtgataggtacataagagaaggtaacatcatcaaaaatgaatatgatctttcaaaactcaatcaattaaaggattcttatttaattaaagatttaataagcagcatgattcaaaagaacccgatgataagacctgatataggtacagtgataaaacatccgtttttctggagtgcagagaagaagttggaatttctactaaaagtttcggacaggtttgaagttgaaagaagagatccgccttcaccattacttttgaaattagaatccatttcaaaggaagttttaggtagtgatggttggtttgataaatttgatgataattttattgataatcttggtaagtataggaaatacaatacccataaactgatggatttattgagagctatcagaaataaatatcatcattaccaagacttgccaaaagacctagcaatggagatgggacaaattcctgacgatttttactattatttttcggataaatttccaagaatgttacttttggtttacaagttggtgcaaaaaatactccacgaggatgaactgctggttcagtttttctaatgttattgataacgtactatctagatcacttttaaatgaacttttatattttttatagatgaaatactcagtctcaccttggatagactagtgggatgatttagactattattgtagagacgattggatcttatgtgtcagccatgggggataggaaaagggattgataaattaatttgatggatagtactttatctcgcttatcaatcatttttgatttataatttaaagggagtaatttccctgtcaacttagcaaccataaattattttgctttttaagaggcgttaaactgtatttttctgtaatccaaggcattcttttaaattgtaatagatacaatgcctattggacaaaagggtaaggaagaaaaacgtctggttgaggacaaagagagaactaagtactggaaaaaatggggaacctatgtttctgaaagaacctggggtgttccgagagaagattatactgatgaaggtgatgcttggcaatttgattttgaaactgctaaaagtagagtttttcgttggaatgaacaaggtatggctggaatttgtgattcacatcaattgttcaatctcacaatggcgttgtggaatgaaaatgatgatattttaaaagagaatttatttggtttaccaggtggtgcttccggtaaaagtggtaatcatggtgaagatgttaaggaattgtactattatttagataatactccaacccattcatatgctaagttcctttacaaatatcctatttcaaagttcccatacgataagttatatgaagaaaactcaaaaagaactaaacatgataccgaatatgaaattacagatactggtgttttcaacaataacaattatttcgatgttttctttgaaatggcaaaggacgaagatgaccctgaagagttatattttagaatcacagcttataatagatcaaatgcgtcagcaccactccacattattccacaactatttttcagaaatacttggtcttggaatttagaatctgaacttgataacgaaaagcctcaattatatcaagaaactgataatgttattagaatgaatcattacaaattaggtgaaagaagaattgtttttgcgccatctcctggtttcgaaggctcaactgatgacattgaacctaagtttttattctgtgataacgaaacaaactttaaagcattatatgacattgagaataaaactgattattgtaaagacggtttccattctcatattgttgatgaagttgaagatgctgttaatccagaaaaaaggggtacgaaagcatgcgcatggtatgtttttgacgataatggtggtgttcctccaggtgattatgtaactattcgttacagattgactaaagatttgtctgataagagtttgtatcttgatgaagaattacttgatgatactatcaaatctcgtatcaatgaagctgatgaattttactggaatgtttctccattacctattcctcaacatttaagaaatgttcaaagacaagcatttgcaggtttattatggaccaaacaattttatcatttcattcatgattattggtataagggtgatccagattctgatttaccaccaactattggtagagctaatgaaagaaacaaggaatggaagaatttgtacaatgaaaacattttatctatgcctgataattttgaatatccattttattgctcatgggatactgcattccatactattcccctaggctatgattgatcctgaatttgcaaaaaatcaattagatttattaactagagaatggtatatgtcacctcagggacaaattccagcttatgaatggaatttctctgatactaatccacctgttcaagcttgggcagcatatagaacttataaaattgagaaaaagaattggggtaccgcagatagatcatttttagaaagagtattccaaaaattattattaaactttacatggtgggttaatagaaaagatgttgacggaaatggtatttttgagggaggatttttaggtcttgataatattagtatttttaatagatctgagccgccagctggtcttcaattattacagtcagatgcatctggttggattgcatggtattctctgacaatgatgaatattgcattagaattggcaaaggaaaattcagtttatgaagatgttgcttccaaattttttgaacattacctattaattgctgatgctatgacctttttaaataagaaggaaaagaatgcaagaccaactgctgattctttatgggatgatgaagaacaatttttctatgataaaattcaatggggtgatgataatatgagttccgttaaagttagatcattagttggtttgatccctttatttgcaaccacaactttagagccagatgttttggatagatttccttcatttaagaaaagattattatggcttgttaaaaacaagaattatttgtttaagaggcatattgcatcaatggatcataaaggtgatggtgatagactgttattagcattagtcaataaggaaagattaactgcaattttacaaaaattatttgatgagtctgaatttttatcagactatggtattagatcactttctaaatatcatgaagatcatccagttcatatgaatattaatggtgaaaattatggtgtttcttacctttcaggtgaatctgattccggtatgtttgggggaaattccaattggagaggaccaatttggtttccaatgaactttttattaattgaatcattattaagattttacttgtattatggatcatcattaaaagttgaagctcctattggaagtggtgaatttttaaatttgggacaagcagctgaagaactccaacaaagattaattcacatttttatgcctggtaaggatggttacaaagcatatttgggcacacctgttgataattctgaaaatgaagatagtattgagttaagtgaagagcaagttcaatataataattcattagaaatgttaaataaggatgaacatttcaaggacttgatgaatttctacgaatactttgatggtgatacaggtaggggtctgggtgctaaatggcaatgtggttggactgcattagttgctagaatgattcaagatgttggtgttatttgtagagaaccaaattcacctgttagaaggaaatcattttatgataagaatgaaattcagagttatgaaccaaaagcatcagcttatccatttttaggtcgtagaaaatcaggtaaatcgttattgaatttagcagcagaaaaattagagcttgatgatgatgagacagcaattcatcaaccccctggattgagcagacgttcatctgttaaaaccatgcaatctgaaggttccatgaatgaagatttcctgaagaatgttagggaagcaatgtctaaatatcaaatttcagatgatgttaatcttaacaaggaggaatatgaaaccaactagattgttatcttttctttctttccttttctttatctttacttaatatgttttttactaatagtttatttataatcacaatcataaaattaaatataatcgaaaaaagaaggggtaattatgtaagacatagtgtagtataaacgtatcccaaataggttttaaaaaagctaacaaaaaatagtgaaagatgtgtgtagattatagaagagtatgtaatatcagcctgcaattttgctgtagataacaagaaagattaatagaactaaaacaacaattataccataagttatcagtttattagttgcaagtcttcttgtcattgttttcaaagttttcaatgatctatcaacataggtatcagcttcacttaaagtatctcttgcattcaagatttgatctcgttgagatcttaaattatttaaaattgaactaccaacagattcagattcaattgcagttctagttgcttcatttaatctttgagacgaacgttcaattgaagcatttgtatttaataatttttgtctttgattgaaaccttcatcggtttctgatgaattattacctattaaataattgacgtctatccttatcatccattaaattttttaaatttttctttaatttatctaaatcactacgatatgtacgtaattttgaattatacattgctctttcatgagttgcaatttgttgaatttccaaactcattgaatcaaccaaatcatgacaatcgtcaattaatgattcaattgccttcatgaggtcaactctacgagtaacattttctagtccgtatacttcatcaagttttgattgtgcatctgtataagccagattgaagtcagtttcataattttcaaataagtcagacatgttgctgattggtttgataagataaagaagaaaggcaattaaaataaaaaataaacactaaaattactggaatcatcatgttgtaaatgattaacgaggttctttttcacgattttcagatatacattaatgatttatctctacacaattacaggtttatattgcattatctacttataatgtatccataatattatactaggtatgtgttaccggtgaattgactacttatggaagtgtataatacacctatgattatgataatcggtgataaaaggacataaatgctttgagaagacagcgagttagagagcgtttattaataataaatggaaggaaatgcttgaaaaatccgagagcggactattttatattggattttgaaataatttattgaatataagttgcttaggtttcattctttttatcttttcattttatcaacaggaaattatgttcagaactatagctaaggttggaacgaggtctttaaaaagaaatactttgtcatttcaacaaagaacttttggtgtctctccaataacttttcatggtcatttgaaaaaaccaaatcctggtgaagaacttcatataacttttataacaaaggaaggtgatcaaaagacttttgaagtagctgaaggtgataatatattggatattgcacaagctaatcatttagatatggaaggtgcatgtggtggttcatgtgcttgttcaacttgtcatattatcgttgatcctgaatattatgataaaattcctgaacctgatgatgatgaaaatgatatgttagatttagcatttggtttaaccgaaacttctagattaggttgtcaagttgttatgtctaaagaacttgatggtattagagtcgcattacctgtactaactcgtaatttcatgaataaggatatgaattaaataaggggaagattatattgatgaaaaaagagagatgaagatgaagtacttaaatatatctttatccgacctaattaatcaataaatcatgtaaagtatcataattatacagaaaaattaagcttaatatcattcgaactgagaaatgattataaagtggcattacttttatgtaaatcttgtttaaaagttaaatatgttagattttttaattttattttaaataatgtaacaaaaaattatatatttataattatacaatatacaatttcataaagatatatatttggaatgaatactgttacttagataagcttaatcatcattttaaggattcaatctgattatttaattcagtaagttcattcttcttagattgtaaaaatatttctaattgagtcacttgtgattgaatagcttcaatgttattaattactgaattcaaactgcttcccccaccaactttattagatgcttgtttgacttgttcttccttatattttgataattgttcaaattcatatttaatcaaatccagtttattatctttccccttattgttcttttcatcctcagcttttttcagaagtttttcaagatcttctaattctcttcttaatttaacttcttcccaatcagttccttctgtttcagtaaaatctgttccattagaaactaaagaattggaatttgaacctaatttatttaaataatcggatgcaaatgattgtttagcttcaggtactttacttggttcaggtatatttatatcagcttgatgagatgatggatcatattcaggtatttctttagaaaatgttgctcttaatgatggtgggattgatcttggaactcttttaccatttgatctttgatttaaaatatgtaaaaacaccagacattgatccttatcaatagttttagattgttttggattaactatattccatgcatatgttatatctgttactggtacttttggtaaactcttatataatccatctaatgaattatatgttattctaccatatgtatcacatgatgcgttatagacatcttcatatgaagttttatcagttggtgatatgtaccaatcaaaatcagaacttaaagtatattcatcatctgtatcactttcaccgccaacattatttaccttagaggacactgcgttatctgcttcaattaaatgacgttttgaacctggaattaaccaatctggtaatttagttggtacacttgatgtattaccattgactaaatcaaagattagtctcattgcaatacagaattcttcaaaatctagtttaccatcaacatctatgtcagctaagtcccatatctttgttaacttatcttgttcaagcctggaatttttgaaaacaggggctagcttttcacctgttaatttcttatcatcaggttttagccctctaaatatttcccagtacttctttatctcccattgttctaactttggcatgttttaagtgtatataattggaattgtcgttgatataatgacaaaacaactatccaaaagctaatttatactccaagtgtattgtgcatgcatcacttcacacactgagtttttgtaattgttgcgaggttccactatgaaaatatcaactttatcaaagaacagcaactgaattcgcttttcagactacttattcactcatctatcaatgagcctagataatatacatcagattactctacttgttcagatcctctacattgattaacttttcagtactctaacctgtgtgatttaaactcaatgcaatgttaatgaaaaaaagattaaaaaaacaatatgagaacctaacaagtagcaagcaaaaaaattgatccctagcaggatcgaactgctgatcttggcgttattagcaccacgccttaaccaactgggccaagggatcttttgttgagttttttaaaatacacttatttctcgtattgtattttggcttacgtaatcacagcaaatagtttattttattattctatttaagtaatgtgttttttcactagtaattactttttttctattataaaaggaatgcctttaaaaaataataactgttttttcaacataaatctatttggtttttagtaataaccatttgtagcaaaaaaaattttataaaaatacattttgctttggatattttttaaaaaaattaacaaatttttaaaaaaaactagtttttatgcaaaaagattagtaacactacaaataattaaccaaaattaccacaaaactataaaataggataatatgtaatttctaaagtacataataaaaagtttttacaaatttttaatattcaaccccaacaaaattctaccaatttatccatccttacgtttttatttgccatctttactaaccatgggtgttcaagcatttgtctaggagatggacgttgtctaccttcctttgtaagacaaaccttaataaaatctttaaatccttttgaccatttaataccttcctcaggctcatcttctagtattggttcaaattcaagtatcattattaataattctaatggacttatttgtaaatctggtgaactttctctgataaatgggaattcacccaatgccccctcaagcactgttaatccaactgaccatacatcacaactaatagtatatggttcattcttaattctttcaggagccatataaaatgatgtaccaatataagtagaagctaaagaattcacgacatcacctgaaacaccaaaatcacataatttaacatctccattagaatttagtaaaatattttgaggtttgatatctctatgcataactttactttcatttaaatatgctaaacctttcaatacactacaggcaatttttcctagaggtttttcacttaatcttccatcacgttctttgaatgccttatagatagcatccaatgatctaccgcccatatattccatacaaatatgaatcgaagaacttgattcatctaaaaatgtaccgtaatatttaacaatatattgagaattaaatttcctattgtaatttagttctctaaccatttgtttttggaattctggagtaggatcagttgttattattttcaatgcaaatattgcaggatttttagttaaagtttgacattttttgactgacccaccattaccttcgcctagaatatcaacagtcttgattagttgtttttcatgtaagattttccaatcagtctctgttaaatcgtcaatacctttgtccaacaacatcctcatactctcttcataagctttattttcattttcattttcattttcattttcattctcgttgttactgttatttttgatgctttcgtcagttggggtattattattgtaagaatctgacaagttacacactacgtcatcattttcatcaagttttaaagtattattgaatgatgaaatcaaactagaagttttggcagataaaggattatcatcattaagagttgaaaaagaggaagtagtcaatgtagtagctgcgctgggtaaactattacctacttcagctgttaatacattcagatttggattggagttagttgataacataggaacgaccacattagtttgagaattgtcagataaattcaaagataatgattcatttggccgtgtagatttattcttgaattgtttaggcattggtggtagttttggcaagtttgtagcgttgaagatatttagcgatggtgccggttgttccataggaatgtccatattcaatttaggtgcaggtttctttctctctcccctagagaaacgtagtctcggaagattggtacttgtattaattgagccgtcattggcatgtatatctgatccagcagccatttgtacttctgtaaatacacagatcaaaaatagaaaacacttcaaaagagaatcaacctttgaaattataatgaaaatttaaatagtctcttgaaggatttcagtacagcaaattgtgagataaaaagcttgctttaattaactaccctgttctttcatttatagctgtacaagacaacaatcatcatgtccaactttgatcctaacttactgccatactttaatcctcaagtggaacgtcgggtttgtttaataacaggtggtaatagtgggttgggatattacactgttttacatctctatcttcatggttacgatgtttatctcgcaggacgaaacaaacaaagagtcttacacgcaatcgactcattgaacaaagaagctgttgctcgtaggtctaaatattcccaatttcaattaaagaaacgatatttaggaactttacattatattcaaatagatttgctatcactaaactcagttgaagaagccgccattgagtttaaaaaacgtgaaaaggtacttcatttacttattcttaatgctggtataatggcaacaccatatagtaaaactgctgatggatttgaaattcaattacaaactagttacatatctcatttcttattaactgatagattatatgatttaatgtcatctccagaaacagacgatcaatttcaattgatgaaaaatgattctaaagtttataacacttcagtggtaaatgaatctggattacaggtcaatgatccaagagtagtgtttttatcttcgattggtcattggtttgtgcctttccattttaacttaaattctcagtttaattattacccgaatattatttttacattattcagatatggaatggccaagtgtgcaggtattcaatttgttaaaactatggcaattcgtcacccatctgttttatcagttgcagttcatccaggaattgttttgaatacaaacttattcagtcatttgacacatctaccattatttggaactttgttttggattttctttcaaatatttgattgggtttttggtgtaagcaacgaagaagggtgttacttcctctgtaaaagcatcattaagtgacgaatttgataaatctgtaagcaatgggaattattatgtcacatttggtgttgaagctaatccaagtacgatagcctctaacaaggattatggtgatgagagttgggcatggaccgtgaaacaacttcgaggaaagaggtcataagatctctaatctatagaggttcttgaattacattaggggagcatgtatcataattatataatagccttttttttagtcattgctttatctagaatagcacgaataaataatgcctttggaaaacaaaattcaaaaacaaatttataaagagaaataattaaacagttgtttatatatttttaataataacagctggttgtcctggaactgcattgtcaatagacttaatcttttgtggaatttcaacatcttcttcggttaaaatatttttaccagtagtagaaccatttgcaaatgaaacgattttaacatcagtaacattaattgcagttggggacttcttaattgaattaaccgcttgtctaacaacatcaatttcgtcaaataataattctctattgaaaacttcatcagccttttcagttaataattgtttctttaattcattgataaatggcatagcacgcttcatatccttaccatcaatttgttccttgacgaatttcatatcttctaatttaccttcttcatgtaatttctttgaaatgtcaacgtatttttgttgccattctgggaatgaagcactaatgaaaatagtaattgaacaatctttttccttatcaacatctacattaccacccttcttcttctttaatgctaaaccttcagattctctaatatttctttgtaagtttctgatgtaagttaaagctgcagttaattcatttgagaccgcagcttctggaattggccatttagcttcattaattgaagtcttcttttcaagaatttctctataaacataatcacagaaatgtggagcaattggtgaaagtaatataacttgagtttcaatatatttgaaaactaaatctctatgtaaacctagaccagttgagattgagatatctctatagaaatctcttgaatattgataatcgaataaacctgtctttaatgcagccttatagtaagtaatatcataattcttataagtttcttcaataagtttgttcatttcgttatcaaaagctttatcaaagaagttgaaaggtccagttcttaattggatctttagtttttttcatttcttcaaaccattcctttaagttgaaaagtcttagaatagctgcattagcattagtttcatcaaaattagcatcttcaacagtatcacctgcatcagcaagtgcaattctacttgcgtcagcaccgaatttaccaactaattgttctaaagtatagaagttaccagtagatttggacatcttagcattatttaataataaatgaccattacatctaatacctgctggccagaaagttttcttgaataatgcaacatgacagtaaatgtagaaagttaaatgatttggaattaaatctttaccagaaattgattgatccattggatagaaatattcaaattctcttcttaataagtttaatttatcagttgaaatcttaatattatctaatgaatcacctctacagaagatataatcaaaagtttcatctgttaaatcttcagctttaatacctaatggaccaacagtttgtccattaaaatcagaatgaagtaaatgacaaatagtatagaatgattgataaacagtggaatctgataatgattcaacaagatatttttcatcccaaggaattttagtacctaaaccataagttcttgaaagagcccaattctttaaccagttaagaacaccttcaaatgcgttattagtttcactatggaaagttttcatttgacctaaacattctaatgcttgttctttccaattttcttcaccataatctaaataccattgatcttctaatgaaacaatacatgaatcaccagatcttgaaataacagcactttctggttcattataaatgattgcatcacctgaatcaactaaatcttgtttaacctttggttttgcaacttcaactgattcacctttgtacttaccaacaattaaagtaccattatagaaaccttctttgtaagctaattcctttgcagctgctaattgattagtatcctttggagagttaatcttcatatctttaactaagaattcagcacatttatcaccatatttaacagtgttaacaattgcaacaggttcttcaataacccaatctttttcaattttgtagtattctggtttattaaataaatctctagtggtaacataatcatctggtgaatcagatggaacacaggtaacaacaccggtacccttgttttctaaaatagtttccattggtaaaactcttaaggtttcatgaacagctaatggggcatgaatctttgaaccaactaataattcaccattaattttaatttctgaatcgaaattacctctaactggagttaaatcttgataacacatattcttgaaagctctttcagtacaaacataataatcattatctgaaactttgaaaataccatagttaatctttggagaaacaaaacaacaagtttgaccgtacatagtttctggtcttaaagttgcagcaactaagaagatatttttattttcaaaatcaaaattttcagctttgaaatattcaacagcctttgaattaaattcagtgactttgattttgataccagtgtattcttgaggtaaaacagcttcaccagattgtctatcatgatccatacaaggttgaccatctttaatagaataaatagtatatcttttaccgaatttaattttacctaattctcttaatctattcatttgccatctaacgaaagcatcataatatggattcatatcagttgtgatcatagatcttctccaatcgactctaccacctaaagatttaacatgtttttcaactaaaggagggaagaaatctaaccaataataaggatcttggaatttagcaatttcttcagttggaatacctaattgttgcataatttggaattgatattttgcattaccagttttttgagcaacttttgcctttgtagcagtaaatttagttggatcagttttagtctttgcatctttttcattcgattctgcttcattttcattatttgaaggtaattttgagaaatcttcaccaaataattcgacttctctctttaatttatcagcagcagcacaaattggcataccagtacaatggaaacctaaagcgaataaagcttttttatttcttaatctttcaaaacctacaccaaaatcaacttttgagtaagtgaaaacgtgaccagcatgtaaaacaccgttcatatatggatatgccattgaagcaaaaaatttaggatgttctgaatgtaattcttcccatgaagtaccgtatggaacgacatcattagttggagcatcaacttcataaggtttttcattttcccaaattttttggtattttttttcaatatcaatcagagtatctctacgagcggtattttccataacgacagccttttggccctcaggaacggcagttgcagcagcactcattgtggatgttgaatattaaaaggtaaatttaaagtaaaagaatgatttaaacagtatcaaattgtataaattgtataaaatctggacaaaaagttggaagttgaaaaattatatgagtcttttctcggaaatttgacttccctctcggaaatttgttgtaagaaaaattgggaaaaaaatttgaaatttccgaatggttccacgtccctacctatttaagtcaatagtttcttttgattgtaattgtaaactccttttcttgtttttatttcttttttcacttacttatatcttcttccagtatatctagacactatgtcacaagtaactgataataccccaatgataatagattttagtactgattcaatagcagctattcaagcctcacttactttgaaaaaaccccttatgttatatattgaaactgaagttgaaactgaaaattcaaatgattcagttaatgaatggattgatatgatacttacaaataatgaatttgtctctaatgatactaaaaaatttattctgactcattttttaagattaaagataactaagaactcacaagactttaataacttagtatctattatccctgcattccataacatcttaaccccgtgtattttatttatattcgcaggtcaagttattgatcacatacctcaagatcttgatccaaaggatgttgatactaaaattaatgatttaattcagaaactttcaagttctaatcttatcaatacttcaaataatgttaataatgatacatcctatttaactccgagtatccagaatactgatcaatctactaatcaatcggatatatcgaataataacaccaataatgtcaccattccaactcctattccaactaataatagagtaccgaaaaaagtatcaactaaatcagaattcaaaaccttaaaggaggaagcagccgaatttgctgctcaaaaatatagggaaaatttaattaaacaacaaaatcaagcaaaaaaagatcgtgaaagaatattacaacttatggaacaagatagaagagagttagagaataggaaattagagaaaattgtatcaccaaatcttgataatgatactaaaattcatgaaaatttacataatgcaaaaattcaaaattctgaaatttatacaattcaaattaaattatttgatggtacaactattcgacatcaatttaagagtaatactaaattattaaatgtacgtgaatacattttaaaagaataccctgattataatataactccattttattttttcaaaaatattgatcgtacaacattaggtgaagctgatgaaaataaacctttaacataccttaacttaaatatgtgcacattaattcttaaacctttagaacatgatgaaacttttaaagtatcagttgctcataataatggtacatttaattggttaaagaaaaaaataaattcatattggtggccaaaggaagaaattcatcaaattgatacaaatcattcaaatcataatgatacagtagaatcagatagtgattgtgatacagcttaccatacaccaattttatcatctacaccatcatcatcttccatacgtccaattgtaagtagtttcaatttatatggatctcaaggtcttatatcttcaacaactaatagttctgatcatattaatacagttgatgctgaaaatgatgaaagtaaggataaattagctgaatcaacaaatactgatcataatacttatacagttaaagatgtcgatgatgttccaattcataatggtaacagtatttcactgaaattctctgatgaggataaataaatgggtttatagaatatttgtaaaatgtttcattaaaattgtttttgtaaattacataaatgttatttgagatatacataaagtttaattagttaattgtttaagagcggggtatttatttatttattcaagtttgagctgaattttgagtttggttttcatcattaacattaaaattataggtgaatgaattaggatcagtaaattcttcaaaaattaaagagtaaatatcattcaataattcttctttattattattaccatcattttcatccttattaggtatttcaagtgatggatcaattggacctggtgatggtaattcactatttaataatttattttgaatgttagtgatgtaactatcagttaatgtcattggttttgaatcagatggtgtatttaaaattgatgtactagttgatgtattatctgaattagtatttatatcagtaatattaatattatctaatttcattgaaaaattttcaactttaccatcaaatttgattaaattatcaacatcatcattattttcttgtttaatattaattgttgataaatcattattattttcttgtttaatatttattgatgatagatcattattattactatcttcattaatattatcagtagattttgaattaaaacctttggaaaaattatttttaacaggtgggaataatgaattatattgtttcctctttgatgaactaaaatcaaatattaaatctctattaccaaaacttaaacgtttttgaccaattgaagattctgaatcattaagttcatccatttcatcaacatcatccaattcatcaatatcatcttcttgaataatctgatttctatcaccaaaactatatcttttattaccaagtataacatcattattaactgaacaattaataatttcattatcatcattttcatcatcatttataataacttcattatcaatatttaaattagcattatgacgtaataaaattccatcaattaaattgattaattttgtacaagtaggatttgatgaacttaagatacgtaatgcctttttacctttaataatatctgtccaccattcattattatgttttgattttggatttgaacattgacaagctaatggaattaaaattgcttgaaataagaaataagttgtataccaatttgaaaatgaatttaatttattaaaaggataattaagatattccattatattatcaattgtctttgatgcagcattaagacaaactcttcttgcatttttagagtcttctgataatgttgcttcctttgttgaagttttagaagttttaccagttgaaataagtacaattttttgccaaatataaggacggaaaattaaaatttgtaaatttgaaattctccaacttaatcttgcacgagataataaaaaccatgaaggtgtttttgaaaaatcattattaaaatattttttaataatttcatcaattggaattgaacaatttaaataatctggtaaactttcattaaatttttcaagttttaaatccattgcatgacattcagctaatgatggtctatttttggaaataatcttaatatagaatggatcagttaaaatacttaattttgcttgttcaattaaagctgagtaaattgttggtgaaccattatcaggtaattttggattcttacttaatgtataatgacttaaaaatgaagcatcatttaataaattattaatttcttcatcatttaaatttgaaggtaatttaacatcaattatatctggtattggtatatgagatggtctaccaaaagtaattgcagcacctgcatcaaaaatataaagacaccaccaaattctacattttgattcttgatcattaataaaagcctttaattcattaacatttttctttgttgaatcctttaattcaatttccttatataaacctaatgaaactgccattgaaacagctaagcctaaataattccaaccagtatttggtttatttctcttttgaacataattacttaataaaataagtgaaatgacataatcaatattaccaagttcgaaaacatgtgataaatttaattttgctaatttataataatgtaaatcataatttgttgaatcaccatacatacaccaagaacctaaagcagtaattgtataataaagacaccaccaagatggattatttggattaagtaaatttttatttaaattttctaaaaatgatgatttattaagtaatggataagaggtatgataaatatcaaaataacttttaataaaatttaattgaatttttctatcatttaattctaatggtttaaaagtttgaattgatgaattactatgatgtaaactatgatgaggagtatgatgtgtagtaaaattttttgattttgattttgattttgattttgtaattgatttaagtttaaatttgaatgtaaatttgaatttgagtttgaatttgaatgtaaattttgtaaattttgtaaatttgaatttgattgtaaatttaattgtgaatgagaatttgaacgagaattataattatcattaacttcatcagctttcattatacgtaagaaagttgtacttgaaccagcgccaaggaaaccagattttgaagcagggttcgcgcccataccatcaagggaagtgaaagaagttatctggggtatagaatttgagtgggatgaattaattgattgaatattaagtaaggaatgtgaatgagtataagttaattttggtgaagagaaaggtgaaataagtggagtttcattatttgattgattatccaattctgcccattcaaatactgatctatctgatttatcagttaaataacgttcaggtaattttggttgagatttaagtgaatttgtaatatttaatgtatgagcagataatttatcagcaaccgttgctcttaaattagcaagtgaagtagatgattttgcagagagtaaggagatagataacgaagatgaagaatttgaatttgaatttgaatttgaattcgatgaagaagaagatgttgaacctgatctattattattattattatgattattattagtattatgattattattagtattacttgaacaattatttttaggtaatgtagaagaaacttcaataatttcatctaatgacatatttggtaataaattttgtaaaacattttcaagttgagataacttatcttcaacttttgttagatgagaacgagttaatggagatctaacagtttttggagagtaaacgcaattccaattatgatcaatacattttgtacaacgaggtaaatcttttgaacattttaatttccgtttacggcatgaatcacaggcctgttcgatttgaacgtttgacattgtgtatgataaagtaagaagatgaaataaattaaattaaatgaagtaaagtaagtaaataaaataaaataaaaggagatacaagtactagaatatattaataagatacagtagaggagacaacacagtaaataaatagcaatatatcaaaatataaattaatcccagaaaccaagagaaaaagttaccataaaatataattttaaaatttataacgatatgtcctgaaatacggcttatatttaaataaatgaataaattagagcgaatataattttttccattattgaagaggagaatcatttgaagtgaggagacattagatcatcggaaaaaccatgttactttttaattaattatgagaaataaatttaaataaatttcaataaatgatccgataattccattattgttggttacagccccacattgaattactattaatttatagtttttccaggtttgcttttctattttttatattattgttttaatatttcactcaaagtatcattattatatatcgtcattaaatcgttatatcgttagatcgtttatttctttttcactaattggtaaattttgttaaattgtaacatgtttatagatttttcattgccccttgttcgtttcagaattatttataattatttaatttattatcattacatcatataccgtatcttatttctaatcccctcacagtattctcattctcctcattatcaatattcctatagaaattaacaatccaactaacaatacccattaatcgactgaaaaatttattaaatctaacatttttataaactaatgttaaatttaacattaattcattaatatatccaataattctcaattattgatctaatcttttcactctttaatatacttaaccattccttatatttaccaccagatattttaacaattctactctcaattttaacaagtttaattaatttatttattttagaaattcttaatataaaatttcttcaaataaattaaaatcattataatataaattttagcagcttgttttaatccataactaattattttcaaatatgaattattcttagttattcgttcaattccgtgggaatattgcttgaattattgcataattatcaacaattgatattacactttccattttatccaatatattatcctcaattttttcatatccacttttatcatatactttaccctctattgtcttcattggttgtattgtattactatgagaaggaatagtcttgtacaacaatccctctcctcttcttaaccttgttgttactctagcttgtaatcctagtaatttacctatctgtttctagtcgcgcttaaaaaatcacggtacagaacatttaatttcccacataatcataacatgacataacattacaaaaattttctctcagtataaatagcccactgtccgcacttttgaaagtggcaaattttaacttctttgcttctttctgttgagacaagagaaaaatataatgttagaaaacattgaagaatacgaaaatacattaaatgaattaagtacattaaaaccacctggagtttcaggttcaagaattaaaaatttaaaagagtattttttatctcataaagatgaacaaattaatttagtaagtttattaattaatagttgtaagaatatacccgtatctaataaacttggtgtattatatgttattgacgcaactacaagaggtttaattgatgaaattggtaatgtagatgttgtttcttcaaatccttcaattattaaaattcaagaaaatattgaagatttattaaatatttctataccgaatgcaaatgaaggatgttcaagatagaatttgtaaattaattgaaatttggattaattcctcaacttttgataaatcaattttattaaatattaaggataaatattttaaatctcatactcctcctggtacacctccaaagaaaaatattgaaacagttagttcatcttcatcatcaaactcaaattcaaattcaaattcaaaatcaaatgatccatcatctgttttacaagctttagcaagtttagctaaaagctctccttctccaaatactaataacagtactagtaataatactaataacaatactaatactaataattctattaatactactaatagtactaatcctactactgtaacttcaccaccttcatcttcaacaaacactgattctgctaactcttcaaatccaaatgcaattttccaacttttacaaaatatgaataaaatgacaaataaaaatgataaatcagttacttcatcatctgatagagatagaactgatagaccaagaatgaaggatagagaaagagatagagatagatagatcaccaactcgtaataataataataataataccaataataactttaatagtaatgaaattgatccaccaactcatgatggtgaaagaaatataccttcaaatcctcattatagaatgaaaaaatcattcgttgattcaagtattccacaaggttgtattaatgttttttcaagaactattttcattggtggtgttccaaatagtatggatgaatatcaattagttgatactcttcaaaccatatgctgaagttcaaagtgttgtaattaatacatcaagaagacatgcgtttgttaaagtttattcaagagctgaagctgataaggtaattcaagcattttcagtttctcatccttcaggtttaagagctagatggggggttggttttggtccaagagattgttgtaattatcagacaggtatttcaacaattccaattcaaagattaacagatgctgataaaaaatggattattagtgcatgaatggggtggatcaacaaatgatttaccattacaatctggtttatttgttgaagaacctgatattgaagttggtcatggagtttcatcaaaatcaatttcaagaaaaatgccaacaaattcatcacataatggtccaaaatctgataatcaacaaagaaacaataataattataataatcataacaatcataataaccataataataatagatataataataattctaatccaaataatatgccaatcaattatggtggttataataataataataatggtttaccacagccaccacaaaattatcaaaatatgccataccaacaacaacaagcaccatatcaacaaccacttaataatcaatttggataccaacaaccaccaatgtcacaaccaccatcatcaggtggtatggcaccaaatatgatgggatcaccaaatagtatgccaatgtcatttaatcaagtaccaggtcaaccacctatggatcaagctgcaatgatgcaagcgatgatgcaagctatgactcaaatgcaaggacaaaatcaaggacaacaaggacaaggacaaccagatatgagtaatatgttacaagtaatggcaaacatgatgcaacaacaaggtcaacaaccacctcgttgaggataaatttgaaattgaagttgaagttattgaattgaagtaatttatagttaaaactagtaatctaacagtattgtacgtaataataatttgatttgtaaatcatcgatacagaaggtatactatcttctatcttctcttgcactatttatctctaaatgcgccgcatcaaattttcacattcttacactgcgccgcaatttggtctatttttcaaacagtagtaagtaataagtctaaattagctctaggtgggaaattattaatgcatgaaaattgtattaagattaacaacacgtccttcttttcccaatctttaactaagcacaatgggtaaaggtccaagtatatttagctttgacgcgtttgctaagacaattgatgatcgaaagattaaaactagcacaggtggtataattacaattgtttgtatatttacaacaattattcttttatttaatgaatatcaagattataatagaattgttttacgtcccgaattagttgttgatagagatagggatcaaaaattacaaataaatttagatatttcatttcctgaaatgccatgtgatttattaagtttagatgtaatggatttaacaggtgaaattgaatttgatttattaaagaatggatttacaaagataagacttggtggtaattatagaaatgatgagattgaagaaattaaatttgatgcaaatgaaattattgatgaaactaatattggtacattagatgatggattttgtggtgaatgctatggatcattaaatcaacaaaataataatgaaaagccgaataatgaaaaaatttgttgtaattcatgtaacagtgttaaagttgcatatgctaaagcaggttggaaattttttgatggtaaagatattaaacaatgtgaacaagaaggttatgttgaaaaaatcaatgaaagattaaatgaaggttgtagagttaaaggtagtgcagaaattaatagaattggtggtaatttacattttgcaccaggtgcatcattattaattaatggtagacatgttcatgatatgtcattatttgataaacatacagataaattttcatttaaacatattattaatcatttttcatttggtgaagattcacatgaacttcaagaaaaatttgaaaatgataaacatgatcatagaacaagtcatccattagataatgttcatgcagatgctggtaataaatatgaaatgtatacttattatcttaaagttgttaatacaagatttgagtatattaatggagaagttattgaaactaatgaattttctgcaactaaacataatcgtccattaagaggtggtagagatgaaattgataagaatacaattcatgctagaggtggattacctggtactttcttctattttgatattagtccacttaaaattataaatagagaagattataatcgttcatttagtgcattcattttaagtttatgttctgcagttgcaggtattcttacagttggatcacttctggacagaaccatttggtcagcacgtagattcatcaaggacaagaagagtacttaaattatagtgtatatatatcgtgtataaatttgtagaagtaaattgtcatgttaaaattaaaactaaaattccgaagtccaaaattgcgagaggaggacttcgtattattaaaaaattcctttccttcgcgtaatgaaaaagctgtttttttatagcatcaaattaatgaaatgttgaatttaattatttagcttttctagaatatatataattattagtattaataatattaatattttacttttgtatagcaatcaacatgtcatcgtttatggccccgattagaggagtgagttttagctctaataactcaacaccacagggaaattcatcatccatctccatgtcaagtgaagttcatcgtcaacagagtacaccatccattaaacgtatggacacggtatcaacaacaaattcaaatctaacatgtgatgattcattatattatatttcgctgcgtttaataaattcattagctaaagttcctggaatgttaccatatattgaattagcatataatgaagcagatacagcttcagagaaacaagctatggctataagttcaagtataacatcaagttcatcaaatactccaatatcagattcatctaattcttcagatatgttattaaataatggtagttcattatcaataagtaatagatcaagtacaactactaattctaatccaagttcaggttccttacatacatatttatcaaaatggaatgaatctatgtatacatttgcaacaggactgttaccagctcagatatcttatgatcctgtaacaccactttccaaattacttaaacaaggtgcacctttgtgtttattatttaatgcgttgaaaccagaaaattctattgaagttgtttcatctgataatttgaaaatttgcaaaacaagtgtttataattttgtaactgcatgtcaattacaccttaatacaaaaaatgatgaattgtttacaatatcacaggtattttcagatagtacaacaaatttacttgatgttatacattcagttaattttattttgagtttagaaccttcattcatttcagatccaatacccgatcaaataattataactgattcaagatcaaaaattgtcaaagaattaattcaaactgaaagaaaatttgtacaagatttagaaacattggtaaattatagagatgatttaattaaagctaattgtatattaaatgaagatattaatatgttattcccaagtttaaatgaaattatagattttcaaagaaaatttttaattggtctagaatgtaatgcaattgtacctcataaatatcaaaggataggatcagcattcatccatgcaggagttgaaagttttaaaatttatgaaaattggtcattatttcaaagttttgcaaatgatttaattcaaagagaggcaaataaattaagaaatgtatcaaatataataaaagatccttatgaattacaaaatttttatttaattaaaccaatacagaggctacttaagtatcctttacttttatcacaattattaaaagaaactgatcaatcatggccaaattataatgaattacatcaagcttatttaatttcaaaggaagttgcattcacgataaatgaatcaaagcgtagatcagaaaatttagtacatttaaatcaattaaatgaacgtgtatctgattggaaaggatataatactaaaaatataggtgatttacttcatttgaatgttgttactgttaaagatctgttaactgatggtcattcaaatgaaaaagaagttcattgttatctttttgaaaaagttatttattttttcaaagaatcatcatcaactaagaataaattacttggatcaaagaagaatccatcgatatttcaaaatagttctcataataattcaagtaataatagttttatgtcaagtaatagcgacttcaataataataataataataataataaccaatccaatttaacattaaatggtattgtttacatcagcaggaatatgtaaaataactgcatcagataattcacaatattttccaggtactccaggtcattatcttacattaagatggaaaggcaataaagatactggaggatgtattatgaaatttaaatctgaggaatctctgaaacaatggcataaaacaattaaacaattatcaatcgatttatcaaatgcttacgaagatactatgctctctaatcatcatattagtaagagtataagtagtttatcaagttcaacaagtttgttaacttcaagtgataatagatcaagtagtacaacaacttcaacaaataacagaaactcagataaattaagaacatcatccgattctagtacatttatgagaaaattaagatctactagtagttcaagttttactaatttatcaaatgtaaattatccaccactcccaacagagaaaacattaagatcattatcaatatcgagtgtgaataattcattcataaatcctaagatacataaaaaatcaccatcaaatagttcatcaagtatattaaatgatgatattgaaatctaatttttctaatcttacattaaaacaaacaagtccagtaataagtcatgaaaattccacaatgataaaactgatatttaatgaaaatcaatcatcaattaatttatcagtaaattctgatataagttatgaaacctttagtttcattactaattgataaaatgaatattaatatgaatagtgatcaaaaatatacttttgaaaatatatcaataaaatttaaggatgaagatggtgattatattagattcagaggtgaagatgattggataattgccaaggaaatgcttgaagaaatggaatctgattatcaaattcttgaattatgtgtttccatggtataaacataatgatatcacgaataacacaaacatggatactctctttatagacaaattatatacgacattaaaaactgttaaaaaaattagaaaaactgtaacacatctatggagtaaatgagtgggataataaatacatcccggagtttttaatacagattaaaataataacactataccagaacaccatatacactctaaatctgaccagtaatttcaatcaaaattgtaatcaccacacatgtactgaaaaattgaaaaccgttaaagcgcataaatcgaaaataaaaataaaaaccggaggaaatttcaattgacagtcggcaatcaatgaaaaaattaatttaacacaacttgtgactctttccattgtcaggttatttgttgaaaatttatatttaaaatgttgaatcatttacattcttttacctattactacatagataacgtgtgtattcagtaaactactataaagaatgttatcctctgttcaaagaaagagttcagtacgcattttacgcaatgttagtcgttataatgttttgaaaaaccttatcagaccaagtacaagattatcaacattcattccaagaacttcaacttcagtcactgcaaaaagatccttttcattcatccacgagaagactacaaagtatcgaaactgcacgttccgaattagatgaagatgaacttgaaatgttaaacgaagagagagtcgttgatacagttgacgtatgtatcgttggtggtggtccagctggtttagccactgctattagattaaagcaaattgataatgaaaaaggtgatggtgaacttagagttgtgctacttgaaaaaggtggtagtattggttcacatattttatcaggtgcagttttagaaccaagagcattaaatgaattatttcctaatgaagatggaattccattacctaaagaaattgtaacactagtaactgaggatcacatgaaatttttattcaagaacggaatggaaattgatttacctgaacctccacaaatgataaatactggtaaaaattatattgcaagtttatcagaagttactaaatggatggctgaaaaggctgaagagttaggctgttgaaatttacccaaatacttcgatcagtgaattgaatctatgatcaagaaggcgcagttaaaggtgttgcaactagagatagtggattacaaagaaatggatcaattagtgaaaattttgaaaaaggtatggaatttcatgctaggatgacagttttagctgaaggttgtcatggttcattaagtaaacaagcgattaataaatatgatttaagaaatggtgttaatcctcaaacttatggtttaggtattaaagaagtttggcaagttgatccagctaaatggaaggaaggttatgtttcacatactatgggctatccattaagtgatggtgtctatggtggtggatggatgtatcattttggtgactggattagttagtgttggtatagttattggattggattataaaaatccatggattagtccatatcaagaatttcaacgtatgaaattacacccattttataaagatgtcttaacaggtggtaaatgtatctcgtatggtgcaagagcattaaacgaaggtggttggcaatctgttcctcaattacactttcctggtggtgttttggttggtgcaagtgcaggttttatgaatgttccaaaaatcaaaggttctcatactgcaattaagagtggtatgttagctgctgaatcaatgtttgataaagttgttaaattaaaggaacaacaagaatctgaaatgttagcatctaatgaaggtaaagaagaaaaagatgaagacgaagaggatgaagaagaagaagatgaaaatgatggtttaccattacctgaatggaaggcaattgatttgccagaatatcaaacttgcatataaaaattcatggatatatgatgaactttatgaagttcgtaacgttagaccatcatttgattctaagttaggtatacttggtggtatagcagtctcaggtatggttacattaataactaagggtaaagaaccatttacacttgaatttaatcataaagattctgattgtgttgaagatgcaagtaaatatgaaaaaattgaatatccaaaacctgatggtgttataacatttgatttaatgacaagtgttagtagaactggtacattccatcgtgaaggtgaacgttgccatttacgtgttcctgatatggatttacaaaaacataaggaaatttcatggtcaaaatataaaggtattgaacaaagattttgtccagctggtgtctatgaatatgttccaaaaactgatgctaaagatgaaaacgatgttgagtttaagattaattcacaaaattgtattcattgtaaaacatgtgatattaaggtaccttcacaagatattaactggacagttcctgaaggtggtgatggtccaaaataccaaatgacttaatattaacaatttaacaatattattcataaattttaaaagtagataattttttaattaattagaaaagaaagttttatatactttatacttgtacagttcactaaaaaacattaacaaaagtaaaatagaataggaactataagttaccggtaaacatttgacttaaatcagatatattcattagaatatttgaatagagaccttggaattcattaccatataaaaggttgaatccatttaattgcaaatttggtttaattgcagttttttcatcattatattcatcatcattatcatcatcatctagcatatcaatatcctcattaaaggatggtttggatgttaatatatttttatgagatctagtatacactaatccacacatttcaaaatattgtaaatttggtaaataacttaatgatgtgtttagttgatttttaatcaaatgatcaaatagataaccattcttattataattgtttaatcttaaaaatcttgcaattggatttataatggaattgctattaactgaataattgcaatctttatgaaccaaatcaagttcctgcccaataattaataatgttgaaactttaattgtttcctcaaataatacagaagttgtagtagatgttagtgataatttttcaagaattgaactgcaaatagtacatagacaattattcaaaaagtttaaatgtgggaataattgaattgcatcctccaatgtaggtataatattacctattaaattttctgatggttgatgaacatttattctaacatcatataatgaatttaaattatttgcaattggactacctaaaaccattaaaaggttagagaaacttaatccatcaatatttaaatcaagattaatttgtaataagtttctaaaagattcacaaaattttaacaacatcattgatcttaaatgatttttatcaatatcttcagtaactaaatcatatttaattaataatttgttgaatattaaatccatgatgctgtataatagttgataatttatccaatgatttgactaatgttaggactttaccatcatcttgtattaaaattgaaagattggttaaattttcaaaaataatatgtttcccaatcagtgataatacggctgatgatgatgtattagttaatgataaagttaaagtatgtaaatttgttaaaactatccccatttttcttaaaatagcaaaaaacccaacaattcgtcgataaacaatttcataattttcatttgaattgactagaaagtgtaattgtgataaatgtttaatcatatgtgggaattttgttatcaatttaaaaattacaatatcttcatttttacccaaattacccttaaaatataaattcttaatgtggtgatgattaaaaaattctattgaacctttattaaaatctaagaaatcacaaaaattataatcaactataattgtatctaaattttgtgcattttcataagttaatggtaaaatcttaatattttcagggaaatgatattttttcaaattttgaaaaattggaaagtattcagatgtacgccacctcggtagatcaaatatttttatatcaacaagtttctctaaatataaataaacaataaaatttgaataatggaaaccaagttttgatggaactgaaattgaatgaataaatttttcaatgttagaatttgttaatattgttatcgagttatttgtacaatgattatttgtttgagcaaatgatagttcttcgctgtttccatttgtagtagaatataatataggttcataaatgatagtatgatataatgattgtataattgaataaaaaatataatgattagtaaatgaaaggtttttctttgaattaatatctaaatgatttgtaattatttgtagtacattctctgggaaatctgttatatttatcatgttattccaaaaagagcttttggtatttatatgatttatagtaatattaataatataataaatggaagttctgtataattttatttattatattgattttaattgttgaacacgttgaataattgttgaatgagaacccacgaaaagaaatatccctaatgcaaatggaaagtctaagctgttgtgatgtataagttaacttgggaatagaagataaagaaaatagtaatacttatcagtacaggttcttagagtgcctattcatgtaaatggccatttaccgcggtgtgaaaagttgaagatttgaaggttttattatggtgaaatttgatttgactgatggtagagtagagtatggtagagtatggtatagtagagtagagtagtatatatatacaagagtaagagtagaataacaataaataaattatacaataagttccttagaggaaggaacattttcaaatccaaataatttacctgcattgacaacttgatcatcatatgcatcctccatattttgaactttaattgatgaaattgcagatactgtaaatgtatatgttttattaagccaaaataataaatctgtaaccactttaatagtcaaggtaacatattttctagttaaataatcatgccatgaatcaatttcaccagtttcaattaaaaattgttcaacatttttatttgcttcatcaaccagtatatttaatctattaactggtgcaccaaaatttctatttaatccttgaacaattctcattgatctcataacaaatactaaacataatgggaatttatcagtattttggaaaaaatctttcattttatcctttaatacaacttgtttctcaaaatatgtcatatttttcattttctctatatgagctttcattgttggactatttttatcacccataccagctaatgtcataatcatttcatcagcttccataccccatgatgttaaaacatctttagtttttacataatttttttccatactaaatttccaaaattcactatattgtctcttaaattttggtgtaaaatgttcatataatccatgatctaaaataactaattgttgaatttccttctccctttggaaaaatttagttaaaggatttgtattttcaactttaattttacgaaccattaaattacctggatgtaaatcacaatgaacaaccccccaagtgaaaacttgtcttgcataaattttagttatttgtaacataattttttgtaaattaaaaccataatttgataattcctcatatttaccaattaattcagcatccatccattcacttataagaattttctttgaagatatattaccataatattttggtatataatattcatttgaatttttaaattctgaatcattattaattaaatttgaaaccatcacagcattttgatattctaatttaaaatttaattcctctctcattttttcacaaacataatcaattgttttatctaatggcatttcaaataaccaaccataaaatttcattacagctctataagtaaataaatcagattctaattgtcttgaaactgaatttttttgaattttaactgcaactttatcaccatttttaagtattgctttatgaacttgagcaattgaagcagaggcaattggtaattcgtcaatttcattgaaaatttcattacgataattttcacctaattctttccttaaagtcatatcacaagttgtccaagattcaactggtgccttatcaaataataatttaaatttatcctgataatgttttgggaacataacaccttgaactgcaatcatttgacccattttaatatataaacctttattttcaaggattaaattatataatctctcagcattacgttcatgtaataaatcaacatcataatcttcattaaagtgtaatttataatcaattgataattttaataaagttgaaattgaattataatttctttgaattaatccgtgacctaaatatgtatcaccaagataaattaatgttgttgtacctaagaaacctataaccattttcttccaaaacttcatctttgcaccagttttaccattgttaacattcttattaccatcactattaccaaacgataattctttaccctctgggatatcatgtacagcctcttgacctaatttcttaggtgatggtggtctatttgataatcttactgggatctttgcagcattcaccttacttgcaaaatgtctgtagttccccatacgggagatcccactccaagatgatgagtgtatgtatctgaataccattcctgcagttacagaaagaagcagttgttcatgtatacagcatagactgactttaagtccttaataactccgtagaaatgaaaatagcattacgtaactttcagttttatgaaaatttttttgttacttagcattattattattattattattattattaattattattattaaaattaaagtactagattaatccacagtttgatttaatttgtatctcctttaattcttttccttttgatctcttggtttatctatcgcatccattgcatattctatttgcttactcttagtggtatactttattcaattagtaagtacagtaagatcttatcaatattaggaaaatttgaggtaattaaattatatttctcatataatatacagaataatttgattgaaataattttaaattgaaataaagtcattatagaaattccatactacacacaaataaactatatacatactcatataaatatataataaatgaaacaatgaaggaaagtcccagaaaaaatcctacaatgtcagggaaatctaataaatcaatagctaagaaaggtccctataatagaaaatctattaaaaatactactaataataattcaaatcgtcggtttagtatattaagtaattcttcaatatcaactgataattcagattctgatgatagtgattcttcatctaatgatcattatttagcaaataagagattaaataccaataataattattatgaagatgaagaggaaggtgatgaagatgaggaagaagattattcatcttcatctgatgatgaaaatattgattttgttcaattaactaaacagagaagagttaaagcaatgaaagctgttaaaagtttaaaacaacaaattaatgaaaattcttcaatatcacctgatcgttcatctcaattatttgaacaagaggaacctgaattagatgatgatttagttgatgcagttatagaaaatgaggaaagaaatatgaatttcgatgaaattaattcaactaatacaaatactccaaatgctacaaataataatttaaataatagtaataatttacatgattattcagatgctgatttaaatgatgatttggaaaatatggattttgatttctcatttgatgatgatgacgataatgattctaacaagaagaagaaaaataaagacgataaacataaaaacaataataatagtaacaataataataataccaacaataataaaactgattctaaaaatgttttggataaacttagagatgaagatattggagaattagttcaaacctccaatccaataataaataaaactaaatcatcagaactcatgaataaaaaaattgatatcgatgttccaaaacttgatgaaaaggaaattaattcagatgctgattatgaatttgataataatgatttaattcaaactttaatgaaagataatgatgatttagaacttcataatttagataatagtgatgatgattttgattatctgattgctaatcaacataatattaatcatgatataattagtaaatcaaataataaagaaattttaatggatggtttagataatgatgattcagaatatttaatgaaagaagaaactcaagctatattggatgattttgaaagagatccaaaactacaagattcctttaaaaatagaagaagtagtatgtatattcaacaatctttcaataatagtagtattgataataataataatgaagatttagatgatttagatttagatttattaaataattttgaacaatttttaccaaagcaacaatcaatgagaaggagatcttcaattttaaatcaaactttattatcatcatctgatgatgaatttgatatgaatatgaatatgaatatgaatattaataataatagacctagaaaatcttataaaaaatcttcttccaaagcatccaaatatgcaagtgggaatcatcatgcaaaaaacattaaacatatgttaggaataactaattcagattcaaactttacatcaaaatttagttctaatgcaattgtcgatagtgatgatgatactaaattattagaatacatttttgaagattcagaatcagagaatggaccaacaccatcacaacaaattgatggtgatgaaactgatgaagatgttaatttacctaaaaaatcaaataaaaatattggtagtaaacatgcaaaggaaattttgtcatcaagtaaagatcaatttcgtgctccaaaacttggtacttttatcactaaaaaaccttatagtattattgatggtgttacaactagattcttacatcctttaaataatgttaaatcatcaatgttacaaagagctgcttcaataactaatccaaatcatccttcaatatccaataataccaattccaataataattcaaatagtaattataatatcgcacttgatgaacttcttaatataagtgaatttgatgaagatacaagtgctgatcaaatggaagcaatgaatggatttttcactgataaacgtttcccacttacagcatttagaaataaaggtttaaatccaaatacaatgaattcatctgaactaatagttaatagtagaagattttcatttactgataagaacaataaaaagaaaaattataaatcatctaaatccaaaataagatcaaataaatcattattgaaatctaaaaatcaacatttacaacagtcaccatcacaaacattacaacaattacaacaatcacaacaatcaccacagcaatcacaatcattaacaaatttactgatacccaaatcaccagactctaacaatataaatgaaaatgatagtatgattttcgatccaaataatattgatgaagttttatttattgaagtcgaatcattaaatgatgcaaattttattaattcaaataataactttgaaataactgcaccacaaaattttacagccgataggaaacgtaaatcaattagtagagcttcaaaggcaagatttagaagagctagtattgctgaagctcatgctgaaggtttaagacaaactaaaaatggtttatttgatgaaaatgttatagatgatgttgaagcattattaatagatatgggtgatgcagatgatttcaaacttctttttggaaatccagtataatcagatttttttatttcaatatctggaaattattattattattattagttaatactcacttcatttcatcttcaatttggttacttcctatttgttttttgtctttcagtactcgattcttgtccgttatttttctctttccattttcttgtatactaactttgctttataaatataatgtatattgagtttttataaattgagtttaccatgttttttacaataattaacacactatttttactaatttaaaaaggtatgattcacgaaaaaaattataaaaaatgacttaatttacaaattttaagtaatattattattcatgttggtttataaatctaagaaaagatagtaaattattttaatgcatcttcaggtaatatgaaattagttaatttagaacttaattcaagttgttgttgaatacatgatgataaatattcaataagtaaagtatcattaatatgagtatctaattttaattttaaatcatttatttcattatctgaaagtttaaatttgagggctgataataaaacttgaccaactttttcatcacctttaatttcaccatttgctactttggaacaatattctgacaatatttgaattaaatttgaaatattctttaattcagtttcaagttgttgtaattcactatttgatgtgattgatgttaaaagattttcattatttacagctttattgatatatttaagtgaagttgattcactctttgattgaatgatttcattttcaataccgacaaatgcaaatgcacctgttttatctaatccaagactatgagaaagatatgatgaagcaggtaaaccaactggacctgagatatatgttttaagaattggtgtaataatttcattattttcatttctatattttaaagttaataaaatttgtggatttgatggtgaaaatttagaataaaattcatgcaataaacctgtatacatatctaatttatcaatagttgagaaccaaccaacaacctgaagttcaggattacttcttttgtataattgaaatgttgaaaaatgatgtgattcttcaaaaattaattcaccatcttcttccttatgtggtacaatatatgcatttttaatggtaacattaccatcatctgaacaagtacctaataaagtaccaattaatcttgttgtatttgattcttcagcagctgaattatcaaaatatattgtttcaataatttctacagctgcactagtatcaatggacacttttaaaggtgatacaattctagttgaagaatagtttggtttattaatatgaagagcaggagatgccattgttgatttgattgtataatgatatatttattcccaaaagtttaccctgtatttcaagatctgtagtgtcaatctagaggtaaagatactgaaaaattcaagaaaaaaattcttttgtaaaaaatgtcaaatttgagagcgggtaacacaaaagcggcaaaaagtcgcgactatggattttttttcttatgatagcagaacatgataattatcatcattaaactactgaacttgttctgtttcttgagatggttgaaaatgttatcctgttctaaactataggtactactgagtaaagtaaattaaaaaccacatgtaaactttgaatgtagaatttaatttatcttttttcttttcttcctcttacgtgtttttgataaataaagtttatttctttaaatattgatatcttgctacgcgtgaaagcaatgtcagaatcacccaatgaaagtgaagtttctactacaagttcagaatccaaaaaggaagaaacaatcacagttacaaaaaatcctttaaattttgaaagtcttcaaagtatagagaattgggggaatatatcatttactgatatttctaaatattttaaatctgaagcaaattcacttgattcattacctaatgtaagacaagcacaatttacatatggtaattcaacaccttcagattcttcaaactatggatcatcagaatatgaattacaagattcatttgctttaggtagttcaattgaaaatttgaatactataataaatgctactgatggtagcaatgatgagtcaaatgaaaaagtagaaaaaaatttgtagaagagctagatttactaaatggttaaataaagttggtgaaatgcaatggtccaagattgttggaatgacgttagttttatctggtgttatcattgcagttttggcagcaacaatcagtgctattgttcaagaaagacattccaaacacaataaattgaatgattcaatattcggtaagcaatatcgtcatttagttggaattagatcaaatatggtagattttgacacaccaaatgattttaaatcttggaaagcatcagatggtgatgattgggttttagcattcagtgatgaatttaattgtgaaggtcgtacattttatcaaggtgatgatcagttttgggaagctgttgatattcattatgcggcaactgataatatggaatggttagatccttcacatataactacaaaggaaggtacattaagaataacaatgtcaaatgaaaaatcacataatttaaattttacttcaggtatgcttcaaagttggaataaattatgtttcacacaagggtatgttgaagcatcaattaaaatgccagcagcaaagaattcttctggactttggcctgctttttggtctttaggaaatttagcaagagcaggatatatggcatcaactgaaggtacatggccatattcttatgaagcatgtgatgttggtgttacaccaaatcaatcttcatcagatggtttatcacatttaccaggtcaaaaattaaactcatgtatctgtaaaggtgaagatcatccaaatccaggtactgcaagatctgcaccagaaattgatattttggaaggcttatacaatgattattcacaaacttttaatgttgcaccatttgatatttggagatatccagattatgatcatcttgcaattacaaatcattcaaatactgcaatgaatgatttcatgggtacaaattatcaagaagctgtctcagcagttgttaaatctaatccaaaatggtatgaagagggtaattttataaaatttggaatggaatatagaagtgatatgaagaatagaatggataattatattaatttttatgttaatgaggttttaacattcagaattaccgaaggtgcatttcatccagacggtaatattgattggagaattataccaaaggaaccaatgagtttaatccttaatttaggtctttcaaactcttggtccaaggttaatatcagtgcaattgatttcccagtgttaatggaagttgattatgtaagaatttatcaaccaaaggataaaatcaatctttcatgtgatccaaaagattacccaacttatgattatattaatgatcatttaaatgcatatacaaatgccaatttaactacatggaaaatggcaggatatgaattcccatcatattccttagatggtaagtgcaagggtaagggaaaaggtaaaggtaaaagtaaagataaaaaagtaaaggtaaagaaagagctctaaataattaaatggggaaaatgagaaaatcaaaaattatttttcactttcaaaattttttttacatgttgaaattgtgtaaattttcctttttaaagtgtaagtttgtttaatcttgtatttataacatattcatatcaatcagtttgtttgtaaagtgaatcaacatataagtaaatattatcatgtctgaaagaagttataaaaaaactaacattgaaccattttatgttggttcagcaaatgcaagtttttcagctgatgcatcattacaagcaactgctgtattagaagacgtagttgttataaatagaataactaattctgtcgtacataccattcaaggtgatggaagtgatgttactactttacgtatttcaccagatggaactaaattagcaattgtctatctttcacaacaattgaaattatttgatattgaaaaaggtgaattttataaatcatataaattatctgcaactgcttatatgtcagcttgtgataaaacatcatcattatttgcatttggtttaactgatggttcagttgttgtttgggatattgaaggttcatttataacacataattttaaaggtcatggatcaactatttctgcactttcattttatggtgattttaattcaaagaattggaaaattgcaagtggtgatattatgggtacaatgaaaatttgggatttagtgaaaagaaaatgtgtttttacatcaaaggaacacaatgctgcagttagaggtgtaaatttcgataaatctggtgaactatttgtttctggtggtagagataatttattaatgctttataatgcaaaaaattggaaagaaattaaatctattcctttagaatcatctgttgaatcaactggtttcattgaaattgagggaaatacgtatctctatacaggtggggaaaattgcgttttatacatatgggattttaaatcagagtcattatttgctaaaactaaagcaccacttgaaacaactgaagagttatccattagtgaagttgttccattatacgaagatgctgagaaacttttattagtattgtccgatcaatctatattggatattgatttttcaatagatttcagtgaaaatacaactataatcccagtttctagaattatggcgggtaatcatggtaccattgcagatttgaaatatgttggtccaaataaagatttaatagcattagcaacaaactcaccagctttaagaatagttgatttatacaatacaccttttgatatggatttatatgaaggtcacacagatttattgaacatgcttgatgtatcggttgatggtaaatggttagctactgcatctaaggataatactgctagattatggaaatatgatgacgatacagatgaaatttatttgttatgccgtctttgaaggtcatgcagcttcagttacagctgttggtttaccacaaacaccaattgatacttatcctaaattcttaattactgcttcagaagatttaactattaagaaatggtcaataccgaaaagtcaatcagaaactccagcagttgttaaagtatcagattatacaagaaaggcacatgataaaatgattcatgctataaatatcagtccaaacaatgatttcattgcaactgcaagtcatgataaaactgccaaaatttgggatttacaaaatggggaaacattacatattctccgtggacataaaagagctgtttatgatatttcattctgtcattatgatagattaattgttacagcatcaggtgatcaaactgctagagtttggaatttagaggatgcttcatgtgttagaagttttgaaggatcttcaaatgcagttcaaagagttgcatttttatctaaaaatcaatatattattggtgcaggtgctgatggtttaatcaaaatatgggaagttagtacaggtgaatgtgttaataccttagataatcatgataatagaatttgggcattaggtataaaggataatggtgatgaatttatatcagcagatgcagatgcagctataactatatggcaagataatacaagtgaagctaatgctgaaaaggaattagctagaaaagttgaaattgaaaaagatcaagaacttagaaattgtattgcacatggtaattgggttgaagcatttatgttggcattagatcttaatcatccaatgagactttataatgtgttaaaggaatgtattgctcaaaataaagattcagattcaacaattggatcattagaattagaggaattaatcggtactttagaagatgataaaattttattgttgtttaagagaattagagattggaatactaatgctagattttttgaagtttctcaaaaagttatcagagtcattcttgatcagtgtgatttagaaaaactttatcaaataaagggtattatgcaatatattgatgcaattattccttattctgaaagacattataatagatttgatggattaattgaacaaagttatatattagattatgtgtccagaaaaatggatgatttatctgcttaagataataagtgtagttataaatcttagagttatagatagatcttgtatattcttataaaaatagttaattgaaaacttgttattaataaaaagcacttagagaagaaccacacaagcttaacagcgaaaaattatatccgaagagacatgaacttttttttcagcagatcttggtttctctataacagtataatattaacattgaattgttcttcttaaagtcatacacaattagctcattctatcgatatgtcgtaccaaaatgagaatgtagcacctagttttagtggaaagaaagtagtaccacaaaaacttgcggaagctactgaaaaatcagattattgggaagaagttattgacattccacaaacatcatggattttcgactttgaagagtttgaaaataatacaccgtcaagaaagaagggtataagttttactgatgaaataactaaacgtgttaaaggtataacttttatttttaactgttgtaagcaactacgattatcaagatctgtaggattaactgctgcaacatgttttcatcgtttttatatgtgtgatgatctcatgaaatatcattattttgaagttgccggtacagctctttttgttgcatgtaaatctgaggagtgtcgaaggagtcttaaagatgttgtgaaagtttgtgcaagagttgcatcaggtaaacctgatgtaattgatgaagaatcaaaagtttactggagatggaaagatttgatggtgaaacttgaagagaccatgcttttccatttaaattttgaagttacaccattaaatcaatataaattatcaatggatgcacttaagataatggatatagtagaggaacaaaactcaattagtcaagaatggaatgaaaaagcaaagaaattatttggtcattgtacttatttgtttgaactatttgcaagaattccaatatgtctattatattcaactaattgtatttgtgcattagtattggtccttgcatgtaaaaaatttgacgaatcccttccaacagaatttatacgaaaagaatttgatacatcagttgaagatattatcaagtgttatgattcagtgatgttactttcattagaagtagaatcattagataagtatttcagaatattacaatttatcccacgagctactaaggatgatatcaatgaaattttcactggtaagggagaaaatcccttttgatagaaatttatattgaagagaatggtatattgttgccctgttcaatatactgttttgattcatgatattttttccagtttttctttgcctcctctattatacttggtcaattggtaaccactttgttaatacaatatgtctatcgcatctcctgtttccaatattaataacgtatgtatagtaatttctttacatgagatttataccaaaaaacagaactaatcaatactaacaattttcaactttttattacatgtagtttactgctgaagaaatccgccaaagaaagtttttgaaacgtggattacaattatctattttagtagtaggtgaatgtggtacaggtaaatcaacattcatcaattcattatgtgatgaggatattgttccaactaatagagcagcaccagctgaattaatgttagaggaacacacagctagaatttatgaagggggtactcaaatttcaatggatattacaattgcacccggatttggtgattttatagataataaattatcaacagaaaaagttgttgaatttattgataatcaatttgaaaaaatgttgagtgaagaatgtagaattcaaagaaataccaaatcaaaggatactagaattcatgcagtattatatttcattagaccaacaggcaaaggattaagagaacttgatattcattgtttaaaatctttaaataataaatgtaatattattccaatcatgtcaaaggctgatttattaacaaatgaagaaagggaaataaatagaaagttaattatggaggatattgttaagaatgatattaatatttatgatttttcatcatgttttgatgatgttattgaatcacagaatgaaagtattatggatttagtaccatttgcaattgtttcaggtaccgaaagaaaattattgatcaagttgaacataaagttagagttgtaccacatggtgttattgaaattgataatcctgaacattctgattttatgattttaagaacttgtttattaggtgcttgtcttcaagatttaaaggaaatgacgcataatgtttattatgaaaaatatcgtactgatatgttaacaagagccaatgttctcggtgttgtgaataaagaaccggaaacatctaacaatatcatttccagaatatctaattccagtaatgttatctaaaaaaattgcttgtgtaaatgagtttataaggaattgctagttaattaatcgataataatagaatagatctctcaaaagattacgtaatattttacaaaataaatttcagtgatgaatcaattgatctatgaattgacgtgtttgaagattcgtagctctttatttagatgatacaatacgtgttgaataacaacgatgctatcaaaagaagacttacacgagcttactttacaatgtcgatataaagaaagagaattattagaaataagtgaactagtttcaccagatcttaatgaaagaaagcaatcaataatcattgaaggaatgccttcaagtggtaaaacatttacaattactaaatatcttgaaaaaatgtatgaaaagtataacacaagttatattaacattaaatgtaaattttgtcattcgcagagagatgtgctacgacaaattcaaaaatcactattaatacattatggattagcatatagtaatgttgaaaaaagaatgacagtttgtaataatttggacagtttccccaattgtttatctacaatgattgatcatacagagaagataaagcccgttattatagtattagatggaattgatgagttaccggagaatgaacgtagtggaatgttagttgctgcattatctaaatttcacgagttaggagaagttggatttgatacattatcatttataagtgttgttaccagagctgactttttgggtattgaaacttttaatatacctattgtctcgtttgactgttataatatggaccaatttaagaatattttatgtgaattacttttagagaaattttggagtttgtatgatagtaaaaacgaggttgggtcagggagtgatgatagtgatacaggaagattatgaaactagtggtgagaatggtgaaattagtgacaaaaaggaagttaaaattgatgagacgaagataattacggaaaatgaaaaaagatcatttttcatacagtttgtggatataatattacaaacacataaaaaatatattccactatgtattgatattgttgtaccaattttgaaaaaagcatggccattatttattgatccattattgaaaactaaatcaattattaaaggtagaaatgatgttttcagtacatttatgaaaaacaagaaattattgagtgaagaatttgcaattgtaaataaaattaataacacagcaactacattattagattttcaaaaatccgatacgaatataattaacaatgataaagcaataaataacattgataataaaggattttatgatttaagtgataaaaccaaatatttaataattgcatcatatttagcatcatataatgaacccaaatttgatagacaatttttcagtaaaactggtgattataataatatcttaaaacgtcgaaagaggagaatagttattaatgataaaggtattggtagaatgagaaggaaaaccaaagctgcaatggcatttacgcttgaaagattattatcaattttaaatgctatatgggtagaaaatgttggtgatgataaattaattaataatgttgaactaattacagaaattggtactttatcaacactgaaaactttaattaagacaaataaaggtaaaatgagtagatggaaatgtaatgttgattggaaagttgttaagaaattttcagatgatgtaggttttgaaatttataattatctacaggattaatatagtttttatataaatggatttaccacatattatcttcttgaccatttatttgagttgttggtatttcaccagctatttccttacaattattttcaatttctggataaaccgatttttcacctaactgagagaataaaattttactctttgaacgtatagttttaatatttttttcataaatatcgacatcttcaggtgtattcgttacatttattagggaatctttataaaattcatttattaacgataaaatatttgataatgaggataaatatttttcaatttttggattatcatctttattttcctttgatagtttagcattattaatttccattaataaatttgaagcttttttcaaagcacctattagtataaatctttggaaacctgtttgaatacctaataattttaccatcacggaaagaatgttcttcaccaattttgaatgcttcatcataactttcttgataaaatgattcctctaaatttaacagggaatcaaaatcaatatctagatcttgagttgtatttttaggagatttgggtattatatctgacattattattgtgggtgatgtaaataaagcgaatataatctacaatttgtaatcactaaggtcttaaaccattcacaggaataaatttgattatgtaattattttttttgacatgaagatttagttatttagtagtcacctagggcgcgtttacattcagtaagactgagtttattttcttcttttttgataatgaaaaggaaacaagaggaagtagaggatagtagtgaagaagaaaataatgaagtgagtgaaaccgaagaagataatgaagaagcaggtaataatggaaattgaggataagattttagatgttttaattggaaaagatgaagatagtagtagtgaatcagatggtgaaaatagtgaaggtgaaattgttaataaattttatgaggagtacgacgatgcgacggtggagcgtgcacgtgaggcggaggctcaagcgacttaaaaacataaaggaaattgaagaaaatagagataaagaagggagataaaggtgatgatgataataatgtaacagaaggctatcaattctataattaatataatggatgaagatagagaaggtgaaacagttggtagtgcgattcaacgaattcaaagacaattattacaagagaagaagagattgaaaataccaagaagtaaattaagacaaccattgaatgggtcacctctacaggataaagttgatttggcatctaatgcgttaatggtattaatgaatagtaatagtgataatgatgtaactaatttgactattaatgagttacgtaatatgttataataatattacggataagtgggatgttgattatgtaacaatatcggaaacccggagagatcaaaaaataaaataaaataaaataaataaataaataaataaataattaattaattaatcaaatcagtgaatcataataatctcttatcagggacatccgggtgtttattaattaagttattaagttattgagtaaattattatttaacctttccccggattccggtattctatatccgtccgggattaaggatcctatatactcaaaagtgtgtcattaactgttaatgattaattaatcattctatccttaactttatttaacttttgacagttgaatataaaaagatagggtcttcccaccctttccatcgattttattatttctttatctttctcatatacttttattctttcttttgaacatcgattaatccataacaactaatcaacaattaatatataacaaaaacatgtcacctatttcaatcttatctcttaatcttgcagcaaaaaatatgattaaattacaatcaaagacaacaaaatcttttatctcttatactactcaacttagatctgcacataatgaacaaacttattatgcttcacaatctgctttatataatcaacctttaaagactcaagtttcaaataatgcaggtggtcaaattgaaagttctgaaatgacttttgttaaaaattctcataattctcatacttcaacttctgatgaagacgatgctgattttgttccaagtgtttcatctgaagataaagttagtggccatggtcattcaaagatctaaatttagtatttaattcttatgataattaattatatgatttggttggttcattttcttgattactcttatggaaatctggttatttccgttgacaaaacaaaaaaaaaaaaaaatacatcatttgtcattatactgagactgttgtgataatattactatattatacctttttgattctttttactactactttactcttatgaaatctttactctactattattatctctctatatttatttcctcagtgcattttatttttattttcaattctttatattttttaatatatttcatgcctcttgctttactaagatttttacatataacctaatagttttttaattattattttataaaaaagttaaaatattctaataattaataataacccccaaaaccacctctattaacaagtacattctcaaatttttctccattaacataacctccacttattgattgtctaacattacgagcaaattgatcaggaaattttgctaaatcatcagctgcatccttatttaatggatcattaggatttggatgtaaaaataaatgtaaaatacctgcaaatattaattgtaatgttaatgttggtttccaatcatttcttaaaatatttaaacatacatgtccattaatatcaatatttggatgataaattttattaaaacatttaaattctggtgcattatttggatagttatttggtatattacattcaaatttaaatttcccacctttataaaatccttcatctggtttgattattaattcaatcttcattggattatttcgttcataaaaaattgaaattgatggtatttcctcatattcttgtaaatctcttttagcacgtataaatgcaacactactgatattattattattattattattattattactattgttacctgtgattattaccatcactgtttaatgtttcattcgccttagctttagctttagcttcttgtagtttctttaaacgaatcatgttatttggtatttgtatttactgtccttgtcgttatatagttacccacattgaaagattctctgaattaaaccacagtaaaagcgaatttaataaattttgtagatcgtattatgtaatcacaaaatttgttgatgttttcttttttcttctttttgatgatctgaaattaatgcccctttttcattttgtttatgttttttttgccttttatatctatttctttgaaacatcgcaattattatggaaatggatgaaacggatgagaatcattccggcttttatacggcaccaagttcaatgcgtttaaatcatcaatttgactcattaagtcaacaacttaatccaaataattcatatgcttcatcaaatgaaaattcaagtataactgaatcaagttcaatttcaagttcaaatgatgaatctgattatgaatctgatgttgaggatgatgccatgttttttggtaataatagagcattgcagtcagttaatgatttaaacgaatcatataatgaaagtttacatagcaatgaagaagatgatttaataacaggtgttaatgatggactgttaggtttttcaagagttttggctaaagaaaaagatatattacagaaagaattagattctttcaaagaagagaatgcagacttacttaatcaaatcaataatttaaaacttacatctgagaaatcaagtcaacgttatgaagatataaaagatgaattacttgcttctgaaaataaattaaatgagaattctaaaatgattcaaaaatatgaaaataaaattaaattattatgtgatgatttatctagttcaaaatctgaaattattaaattaaataaaactgttaaagaaatcagtgataataaagaagatattttaaaatcaaatgaagctcaagttcgaaaactaaaaagtcaaattgatgaattgaaaaatttaaatgattcatttgaaaaagaaattggaattcaaaccgaacaaattttagagctgaaaaatcaaattaaagatttaaaatcagagattaacaatctgaaagttgccaaaattgatggaaacgttaatcatgatgataaagaaacatcatttattgatgattctattttaattgatgaattccctcaactaaatgttaaagaattcaatgaaatccaatcagataaacttaaaatgaaaataaagcaactgaattcatatataagagctatcaaagataaaaatgaaaaaattgatttagatttaaaaagttatcaaaaatctgaatttattagaaaactgagttttgataattcaaaagaaattgataactcttttgatgaaatggatgtctcaattcatttctctgatgatgatgaacaaaatgaaagtgttttagataccaaaaataacaataatacatcattctccgcaaatattttaccccagaatattgatttaaatggtagtacaccaatctcttctagaaaaccgtcaatctcaactcccacaaaacctcattacacattgcttctacctaaaactattttgaataatgaatttgtttttgataaattagatttgaatgaataccatactattaacttatctgaaactaatattacaaaattaagcctgcaaccacaaaatcaattatcttatttgaactataatatagtatcaaatgattttgtcaataatttaaacaaagagattaaagaattgaaaaataaagttgaaaatcctaatttatcagctttaaaggaaaaacataacctaattgactcttcagcattagatatttcacgtaaggctcatgaagctacatgttctatgctagaagtaaaaattgaggaattacaaaagaagattgataaaccggatgttgaatatataaaaactaaatgtcatgaaaaaagttttgaaatgatttcatctttagagttggagaagatgaagaaatcaaaagaaaatgaagttcatcaacttaaacaaaaattgagtgttttgaatactacatttgaatcacctacaaaagagtacttattatcgcatgctagtgaccataaactagtaatggtagatgaggatcaattcaaaactactgatgaaactatcaagagtttgacgaacttattagaagaaagaaataatgatctggaattcttcaaaaataacttaacctcattgcaaaatcaacttgactccccatctattgaatacttaacagaaaaggcgaaattgaagaaatgtaccgttattactgacgatgacctctccaacctgaaatctaccaagactatcattgaatccagattaaatgatgctaatgattatattgaaattctattgagtacgaaatcaaaacttgaaactgataaaactgaattagaaaataaaatattagagctggaaaataaatgtaccaagcttcatgaacttaatgaaaatccaactttaaagtatttagaattgaaatctaattcacttgatttcctgcttctttcacgtacctctcatcaggctgaaatttctaaatcagagttttactctaaacaatatgaaaatctaatttctgaaaataaaaagctgaaacaaaaaattgataagcctgagtttaattatatttcagaaaaattactacaattatacaattatagatgtatttctaatgaagaatttaattccattaataacgaaaaatctgatattgctcttaagttggatacttccaacaaattaaatcaaacacttcaagaaaaaattgacagcaatgtctccgaaattggtgttttgaactcaaaaatagttcttttagaaaatgaaattgtgaatctaactgctaagtatgaaactaaacaaactagctacaatgatttgaggaacaaattagattctccatcaattggttacttgaaagagaaatgcaccaatcaggattttgttctcttgaagacagaagaatataagaatctacaaactgatattaagtttgctaatgaacaattacaaaaaagtaatgatgaattagaacataccaaacaattgaaaatttcactggagaaggagtttagagataatgttaacaatacagttgcagcatcattatttgatgctactaagtctgaattggaagacgctaagttggaaatcttgtctcaggaaaataagttgaaagaattagattttattaaatctgaactgattgatgccaaatcacagattggtacccaaattattaaattgaaagacttagattcaactaaattggagctggaagatgcaaaaacacaaattgagacgcaaaattttaaattaaaggaattcattttaacaaaatcgaaattaaccaatgataaatcagaaattgaaaatcaaaaaattgaattgcaacaattagattcaactaaagcagagctggaaacaaagttagaagaagctttaaataagatcaagttgaaagaatcagaattagatacaacttcagccaaggtagagtcattggagataattaaagataaattaaaggagaagagtgcgcagctcgaagatgtggaaaccgataaggttcaattgcaaaatgaaattcattcactcgaaggaattagggaaaaactggcagaatcagagaataaagttgtttctttaaatgaaaaactggttaatttgaactatattcacgaaaaacctagtgttgagtatttaacagaaaaagctattgaacaaaataaagttttattaactactgaagaaaaggcaaacttggttactaatctgaaagaggttagttccaaaaatgtaaatttaatcaatttaaaggaaactctggagaatcaagttaaggagcatgaaacagagatcaattatttaaaaatcaatattcagaatctcaaaagagaaaatactgatttaatcaaacaattagaggaagtgaagtctttacaaaataacccaactgttgactacatcaaatctaaatcaactactttggaactggttgcaattccaattaaacaacattctgaactaaaattaaacaatcaaaagcaaatatcaatgatacaaactcataaggaggaagctattaaacttaaaaagtcactagcagaagctaaaacagccattgacaatccaaacttagaatttttggaagctaaattaaagaattttgattgcattcctgttaagaataaagaattagaagaattcaaattggctaaacttgaagttgataaacactctaagattcaaaagcaaaatgctgaaaaaatcaatattctagaaactaaagttgctgaaaaagaaaagcaaatagatgagttaaatcatttgaaaattgaagtatctaccaaacaagctgaacttgacaaaactttatctcaacttgatcaagcggtttcactttataatgagccatctgttcaatatctgatttctaaattagattcaaattcttataaagcaatgcctgcagcggaatacaccaagattgatgaaggtatcaaaggtttagaaaagaaacttgaagattgtaataaaaacttgggtgaaaaatcaagtctattggaatcacttaaattagaattagaaaatactaaagtcgattatgaagctcaaatcaaattattaaaggaagaggcgttaaacacacaaagctctgctcctatctctgctataaaatacactaatgaaaataatattgattcacactctattgctgctgttaaatctgaagatgaaaatacttcagagttacaagtacaacatcttaaagatctggcctctaaacatggttatgctataatttcatcacaagatttctctacattaattgaatataaaaataagtttgaaaacgtggaaacaaagtcatttgaagaacctagcgaaacgatcaagcaagcagaagaaaaggttcatttattgaccaaagaaatagagactttagaaaaacaagtagaaacagattcaactgacaaaggtggaaaatcaaaaaactcaaaatcaaagaaagaattaaatacacaacttgaatcaaaggaaaaagctttaaaatctgaaagtgatattcttacagagttatacgacaagctgaaaaaactcaaaactattgagtcacctcacattaacaatgttgatgcagaagaaattaccaccttgaaaaaagaacttgctcaacttcaaaataagtatgaatctaagaacaatgaaatggagcttttaaaatcaaaaatgaatgaaacttctgaacctagggttttggctgatgtattgagcttacttggatattcaataagaacaccagataaaacgcatattcaattaggatctattaagttgcataaacaaaatattaaacttaaatcagttgtagataacaagtggtataattctgctgatggtgtatttgatattgatagattgattagtgaagaaaaatacatattattgaataatcaagaattgaaacaaaaatgtgatctaatgctcaaatctatgaaaacagatgaaattaagaaactaatgataaatttagacatggttgttttacaaaaggctgaatatcaaactttgaatgaagctataaatcaaaaggatgatgttccatcaactttgacattacaagatttgaaaaaacatgctgatatattagatatagtaacaatgaccaaatctgaagctgaaaatttgaagaattcaaaaataacttcatccatgctaactgataaagcaaatgagctgggtatggttctatttacaaaggaagaggttcaaaaattagaaactaagaaaccagtcaccaaagaaaatattgttgcaaaagctaaagaatttgacttattatgtatttctaaatcaagatatgttgcaacttcaattgctagaactccagatgttgatcatgttaaagttgttccaaatagttactatagtatccttgtcaatagtcatgcatggtttaaaaataataaaagatcaatttcaaccccaaccagacctgaaactattacagaaaatgacaatactgaggttgcatcattttcaccttctaatattactcaaacattcagcaccaaagataatcaactccatttaccagctaaagtggatgaagctgatttaatgtcattaaattcagttgctacagaaatctccaataaggctgaaatacgtgctgcaattactaaaactgttattggtgaaacactgtataaatattacagaaaactgggacctctttcaaatgtttcagatacaagacacccgaaatatttttggattcatgcacatacatgtacattatattgggcaaagtctaatcctgttttatcaccagatggtaaaaagacaatcaaatcagctaaaatttatggtattacttcagttgatgataagaatccacttccagttggtctgtattataaaacgttagttttgaaaacaagtagtaaaacaatgagaattacttgtccaactagacaaattcataatatttggtataatgcaataatttatttattagagagatccacagataatttaattaatgatacaaattttgaaaatcaatatgaacaagatttttcattagatagaaaaactgctcttgaaagaacacaatcacaatctgttagacaacacagtcttcgtcattcaccaagtatgagaaataatagctttagaatcaatcattcacaatctacgagatcaatgcgtagtattagataatatatatatatatataatcgttaataaattgtgtagatattatttagaattatatactaaaaaatgtaaaataaatcttgctacaaaagtaaattgtaaattatgacattaatttattatgttaagtagtattataaagaaaaaaaggatataaaataaacggataaaaattcaaattggtcaatagttaaatggtattttcattaaaatgaacatggaatgtaaatggtttaattaatatttagttaaaattgaagttatatattgtttaactaattctctttcttattatagaatggatttaataaagaaactgttaaacatggtaatgacataccaatttcagctcttaaaaggattggaactttctttaacaacccaatatcttgaatataatcatcaccattaatagttgttgataaaggtttaatataaggatctaatgcattttccccttcttcaggttgcaaaacttcaacttttggtgcctttaaatttaattttgttaataattttgacatttcaggacttaataaacttgaaccatccgaattttttgaagtttcttgtttctttgcagcatcaagtgatgaaactctaaatttatttttaattgatgatctatatgataatggttcattttcatcttctggaatatatgttgctgaatcaacatttggttcccaaaataatctcaaaactttattaaatctatcaaattctgccttctttaatggtaattgatcaccatgaactcttttctcaataccaaattctggtaaataaacatcaaatgcagattcataaacttgtaaaacaataccagtacataaaacttcccctgtttgtgcactcatatcattgatagtttgtgaaagtaataaatgaatagcttgactttgagtttcacttgcacaatctttcttaaagttacaataatcacttaagacttttaatgattcaacatcttcattatattcagcaacattatttttaataacagcctttaattgtctatgaacaataatatcagcatatcttcttaatggagcattaaaatgtgtgtatgttggtaaattaaataagtaatgaagtaattcttgctctaatttacctgcaataatatatttacctcttcccatacacttaactaatatagtttcaacagctgctcttttgattggatcatcaatacttaaaatagagttttggaaactacctgcactgcttgtgtctaaattaacacctaattgtgaaactttttcttgataatattcaaatttatttaatgttgggattgaaaactttcttaaaaatgcacgatcgcctaaaactgaatgaactttttgagcaacagctgaattaaccgtatgaaatatttcatcaaaaacaaatgagagtaatgaatcatcataaatattcagacttaatttaacattttcatcatctagttgatttaataatggtaaagtatattcagtatttaaatttggattattcaaacgctttttctttaatcttgaagaaatcaatttaagtgatgcaaaataacttgagattgcactatcatcattacctgcatttttcaaaattttatcaatttcctcataattaattctcttagttggttgaacggtagtttcacccatccaaacattttcgatttcaaatgaaattgaatcaatttcaaaaacaactgataatgctggtgattttgaacctgtcttaaatgaaatcaattcattaacatgatctggaaataaattaacacttttttgaggtaagaaaacaccatgtgatcttttcttagcacgtttatcaatatttgaaccatcaataacatattcactaacatcaacaatatgaacacctaactcaattttattatttgcgatacctttaacatggaatgcatgatcacaaaataatccattttgagaacaagcaataatataatcatcagcaaattctcttctattagaattagacaaaatatattcagttgatgggaaatttaacatatatttttcttcaccatcaatatattcatcgcacataaaattattatctcttaaaattgattcaacttcaacagctttatcatctgttgtacctaatcttgaaactaaagtaccgaatggatgtaatgaagtgaattggccatcttttaatggatgcaataaatgtttgattagcatatttttcatgattctctacaaaatcttttggagcttgttcagttggaattgcaattaatggaactttcttatctataggtttaaaccaaacaattttaggtttataattgtttttattgttgttattattactttctttatctttacctttttctttttctttttcctttttagcagcttgtgaaggtcttaataaacctaaagtaccagaaaaaagttgacctggaatacgatcaataacagcaacaacgtgaccagcatataaaggtttagcatcatcatgtaatttcttcttcttcaactaaaagtaaagattgaccttcaacttcaacatcatcgttcttcttttgaattggtctttgctttaatgaaccttttctgttaagcgaggagttattattatttgaactactattaaattgatcattatttgatgaagtacttgcatcattatgaacatcatcattaagatcaatattaacctttgaatcttttcttctctttttttcttccttttcacgttttgaagaccaaacttcatcaacaattaataattcaactgcaaccaaatcgccttctaaagctctattacgatcttttgaaccacaaatgaaaatatctgcatcaagtaaaccatcagttgaaacataagcatctgatctattttttttattaactcttaaaatacccgtaactaattttccttcatctattaaatcgggtaatgaactttgaggtaaataaggagcaaaaagtgattttctttgatttggattattagcacctccgttaaattgtgaaatcgaagagattgaaccaccataagaattttttgaacgatgacctggtaaaaagcttggagattcaaaactcatggaattggtgtgattatgattattgtgattattgggtggtgaaggagtttgaggactctttctccaatttgaattcaaatcagaaccagtacttctatgacctaaatttgaattattttgatatctatcagcaaatgaaggttgaggaggttgtagagtttgagaatgagaatgatctcttggagggaattggaaacctctttgaggagatttgtctgaaacaattgatctatttcttgaatgagatggggaatttctataaccgaaagaatcattatcattattttgaggagttgccgggaatttaaaagctggaggatttaacatatttggagaactagttaaatcataaagatttgaatcattgtgagtgttacttgattgagctgaaattgataatttagaaggagagttatatctttgagcatgtgcttcagctgctgcctttttagcttctgccaaacctaatgagtgtcttcttgtatgacctaaagcttgaggtctagagtcagttttagagaaaggaatacttccaattgaggtgacagatgattgagatcttctatgacttcttggagatgaataattattagaggagggaacattactatctaattgatcttgataatttaaagttgaagcagatcttctgtgataattggaaggagaattagttttaatattagcatttgcgtttgtatttgtatttgaagtagaagcgtaagtagttgtaataagtggtggaggttgaagaccttgggaaattttgattttggattattgattgattgttgttgagcttgttgagcttgttgagcttgttgttgtaaaatttgttgttgttgagcttgaacaacttctaattgacgttgtaaacttaattgttccactataataaaaaaatttgaaaagagaatgttagtataatgttttaaaaaattgggacaataaagttaaaaagtacatacgcatcaatgtagttaattctgaaggagatcttctatgtgcaacatgtaaagttcttggtttatcaccagttgtttgaatgattgattgttgatataaatcattttggtttaaattattcaaatcattggattcatttgaagtattattaatattatttaaagtattaaaactgtttaaatttttgtaattatccatattggaattttattatactaataatgaaattttatatgttgaaaatgtatgttttttttttctttttcttttatatgttggtttaataataagatatattagagaacgtaaatattaaattgagtttgtaaagtatgtttgcttcttttattattttgatgtcaactgaattaaaataaaaagggaatgatttaattttattataagctattaatagcaattgaggattaataagtcgatataaaacttaatatagtaaatgataatgatagtcttgatgtgattgactaattgctattaactaataaccaattgagctagtgtaagaaggagagcaaacgacaaaaaggatggatatatgtagaagtgtaatttagctatttattcacacttcttaataatataaatttaaagaatgaactttcctttttttttgtaaattaaagtatgattattatataataaaaaattgaaatgataattaaatattataacaattgaaatattacaatggcagtaattggggacgtggagatacttgtaatagagggaatatagataataaatacaagataagagggaagagagggaagagatggaagagatggaataggcagacaatgagccccaggaaggcgttcggtctcgaactcataaaaaaaagagggaaaatttgacaatttgacaatttgacactaaaataaaataaataaataaaattgacactcactctattgaaaattaaattaaaattaaaaaattgatggatctctctaatagcaaaactcaaattagcaattacccctgtgagcaattaataaatttaaataaataaataaatcattgtgtcgtcccatcgtcgctgtttggaagacgcgctacatgaaaattgaaatttttcgaaattttgtgattttgtgattttgagattgaaattttgaagttggaaaaaataatatgccgtcaacagaaaggtgagaacccacttcgaaacatagtgtacaggattatcaaattatccgtatttcagatttaccctttactacaatatatattagagtcattccaatacatagaatcatattcatcaataatcacacgtttttttaatataggtatgtatcctctatatcactatttctccttagttttccataattgttactctaaatcagcaatatcttcaccaatttcaattttaaacatcctgatcaaaattccgtattttattgaatatttcaatatacatatgacatagtatgattgtttcaaataaaaggaatatttatactaacattaccctgcctacttctctcttattagttttaaatgtcaactataacaataaatgatttaaactcaacaacgagccccacacgtaataataatggttttactaaaaaaaatactgaaaaaaaattattattgaaaaataaaaattatcaatatcaatatactaaaatgaatgttgatttatcattaattaatgatttatcaaataatttaaatccaaatgactattttaatgaagaaaatttatatcattattgtaatttaattcttgataaatattataatactaataatcaaaacgataataataatggttatagtgaaacacatcaaaatatcgcgttgtttagaaactactccagttacggtccaaaagctaaaaatattgatatattatttacatccctttttatggaaaaaagaatggcatttagctattggttttaataaatataataaaattttattaattgattgttcaaattttaaaatttcaaattataatcaaaataatgaaaaggatgaaaatattgataatattgaaaatagtcaaaataaggaaattatatacccttcatttccaactaaaacttctttaagagttgaagcaatttatttgtttctttaaaaggaaactttcaaaacattctttaaaatatccaagattatataccgacctatttgaacctgcaactccttataattcaattaatttattaacaattgtattcagtttttgtttagatgctgtatcattaactagaagtttttgtgatcctgaattttctccaagaaaatttgatatatctgatatacatcctctgttagataatttaaattatttatttatagaagagttagcttcaaaggaaagagaaattgaaaaattagctaaactaaaacaattagaggaacaacgattgaaagaaaaaaacttaaaacaggaagcaaaggagagagagaaacaagaaaaaagagagagggagattggaaagagcggaaagattaaggaaacttaaattattagaggaaaagcaaaaactgcaaagagaaaaggaagaaagagaagaaagagaaagaaaagagaaagaaagaatagaaaaggaaaaattagagaaagaaagaataaaacgtttaaatgaattaaaaatattggaagagagtaaaagaatagaaaatgaacgaaaactgaaagaacaaaaaaagttagatgaaattcaaaacctggaaaagataaagcaattagaaatcatcaaacaaaatgaacaaagggagaagatcaaaaaacaaaaagaattgaaagaattgaaagaacttaatgaacaaaaactaaaagataaagcaataaaagataagatagaattattaaataatgcacgtaaaagagaggttgacctctcacctccagttgaagacaaaaataatgaatttatggttgataacatagctaaaagacaaaaatatatgccaaggaactagaggtacaatatttacaccaattgaaataaatgatttggatgatgcagacgatgatgatgatgatgatgaaaatgttgatgatgcagaagagataaatgatatccatattaaaaacgaaactgaaatgtcagttactccaaaattgaagataaataataaaagtatagctcaaattaaatctacgacttcaacttcaaaggataaacgtattttaaaactctcattaatatttgaaaaaagaattgcaatagcatttcaaaaacatttacaaaattcagaactttttggtagcaatattaaacttgatttaatgtttgagtttattcaaaatttggttaataatccattgacaaattcttcacttctattaaatccaaattcaaatactaataatacgtatgatatcaaaccatgtttgttagtcaattataaaagaagaatgaaacaagaatttaatgaagaaagatgtttagaaattttgaaaaaagattcattaaatcaaattattccacttgtttttgaaaatggtagtatattcttaatcaatattaaaactaatgataaattcaattgtattgttaaattaatttgtgtttcaaatagatcaagtagatcggaaagagaaattatgaaaaattatgcatttagaagattaattgaactttatgttggaaaatataagagattgattattaaaattagatcatctatcatattagtgaaaacaccatcattttacaaattagcaatgcaatcaatatttgctattcatcatatattatggaagggtaagtttgatatgatgtttaatccgaaaattgaaatattagataattacgttgcattttttgaaaatataatgaaatgtacagtagagaatgatatgtttaaagctgaacttaattttaaaaggcttacaaaacatattattggtgaatcataaattttgtaaaatataataattccaaaataaataagtaaatttctataattacaatgtaatagacgatttatcgaataaatattttttttgaatttataacagtattataccatatattatatatatcttttatgagtaaggaatctatttaatgaaaaccttcagcaccaccagttaaaacatcattaatttcaacatcattaagtggtgtgtatctaaatcttttggaaagattgtttcttgattggaaagaagctgcatgacctgaagttggagcagatacaattgcactaggttttaatccagctggtgcacatgggtggaaagacacaggtgtgtgggctatacgaatgtaattattgatgttagtatccatgttgtaaaatatagtgattccttaatcaaaaaaaaagttcttttataattgatacttactagcaacgtgtggaccccctacaaatttaatcaaagggacatgttgtaatattcttaaagtagccttcattgctattcgggtgttggaacgttaaataaaggtttatctgaagttgaattgtttaatcaacatattgtaatcaatataattcatgtaacaaaacgccatattaaacatcttccccgtataaccgagttcgactccgggagtaaaaaaattaataggtaagtataatagtcgggtcgatcacgtgatatttttattttaaaattacgtaatgatttttaataacatgaatttcataatatcagggattagagaatttgccctcagttcaggttatagaggagagttgtataagttaaaataaaaccgtgttattttattcaattgactaaatagaatattaaacaataggcaatgaatcacgatcctttccattggggtagaccatctaccaaaacttacggtgagtataattatttaatctccaatgcatcaaatattgatagaagtgtaaaaagtaattctgaattcccaaaaatgcatacacaacaaccaatgattacaggtacatccgttattgcgattaaatataaggatggtataataatggcagcagatcatatgggttcatatggctcattaatgaaattagaagatttaaagagaataatacaagttggtgatgatgcagtcgttggaatttccggtgatattagtgatttccaatatttagaaagattattagatgatttacaaattgaagatgcatatgatatggatcaagaacatttaaaggcaaatcatttatctgaatatttaactagagtaatgtataatagaagaacaaagatgaatccactttggaatgctattatagttgcaggctttgatgataaagatgaaccatatcttaagcatattgatttattaggtgtttcatatacttctccaacattagctacaggttttggtaatcatttagcaattccacttttaagaaagaaagttgaaactgaagatgatgtaaaaaaatctttcaaaggaagatgcgattcaaactataaaagattgtatgaaagttttattttatagagatgctagatcctggaataaatattctctttgtgttattgaaaaatcaactaaatcaattacacttgaacatgaagttcaagttgaaaatatgaaatgggattttgctcaacatattacaggttatggtgttccacaattataaatacttttgtaactagtttttaaggataataaataattatacataaagtaagtcattgatcagagcgtaactacaagaactacagtaatttacattttataaaataataagctatgaatttatatttttaatactatacaattaaagatatgccagataacgcaatggaaaagttaattcctagattatgaacagtattcaactcgtttaatttggatagtattaactgcctcggatttatatcctctaaagtttccttgacatgaataataatgacatttaaatcctttaatggttgaaaaattgaagatttatagtaatcatcatcataaggtaatgtttgatctatctgtttaccaggatgtttattcttcaaatcaatacatatttttctaagatttaacatttcgtaaattaaatttgaaggtgtcaggtgaccaaaaagtggaggtggcatatcagttgttgaacattctattatacatgtatttaatttatcttcattaattaaaggtgagacattattccagataattgaattataattagtatttgaggataaatcagattctacatctccaaagaataaaacattgtagtcatgaagtttatcctttattagaaatgctgtactaaagtatctatcattgttaatcaaatgcattccgtgactaactttgaacaatgacaatgcatatctatcagataaatcgttataaatcacattctcttccaatatattcaaggaaattaatccaagtgaaacaaggtctggccaaacagagtcattaaatagattattccgaatagaagtcatagtttctgaaattccgaaaaactttcttgggttttttaaatgctggtgagtttatcaccaaacttgaaacatgatcaaggatgtgaatgtgttataaaataaccatttatggagtttagtattctatgggctatttggaaattggttaaacttcctgtagattcatcaagatcgacacaattatctaataacgactgttttatattactgaatggtatctttatatccatgttatcagtgcatatgaatttactcatacaattgacaagtttatccatattatcaaaagttttagggtacaattccactaaaaatgacgatttcaaataatctaatttatttttctcttcattatctaaaatgtcaaaaatagaagtcagaccagttccggcatcaattgcaagtaagggataatttttgggtccgttatttgttttcaatataatcaacatatgcaacatctgtaggttttagtaaaaatgaacatgttttcccagacaatggaccgcctgaacaacctaatataatcaattcaaagtattttttatttgtaggcatcactgaacttgacttgtgattatctaattgttatattgtagacgtgacacaaccagatgagttgacacagatagggatattaaccaacaaattacatataaaaaatcttaagatatgcaaaaagagcaattagctggttaaaggaaggaaatttggtttttttaacaaaatagtcgttagagaatgtttaacattgttcaacaaaagggctgggcatcgaagaaaattccattgcagcaacattaaaatagctttttttctacgaaatacaatttttccctaattcattctttcaccaagcctgatgaaacatacactataaaaatacttcacctttgaatgacttgtatacatgaagaaaaggaatttaaagagggtgtttctttgtatacataaaaggtaaccctactaaaaagatagatattagtccacccaacaatttgactaacatccaattgtgttataatttgttgatcaccatagaggccgtatcatattttacaaagttgcaaaatttattacataagtactaatacaattggataaagtatcacaacggatattttgccaagtatgattatacaaataagagcttgatgagtggcaacaatatatacggaatctcttcactcaacatgcgtggcggtaagacaagtttctttatccggaagcttttctcagtcaaagctatgtcactattatttcaaattgaaagattgttaaggatacattgaaacctgtcagctaaattgtttccaataagttcaaaaaattattgcatggcaaaacttttggcaaataataaagcaaaatttcgatcgtttttcagatattaaattaatacatcgataaactattatagcatatcaagtatactatggcattgtcacactcaaaaaatgttattttaacttgtattaaaacttaaaactcctaaagaatagaaagcttttttatatttttaaagtatcaatctaagatttttgtgtaaaactgaaagaatatataacttcagaatgctaatcaatttagttgccaagcctccactgataagaaaaattgaattttaaggtgaccgccgcgacgaccccacctttgtagataagctttctggatagggttttcgtcttgctatcatggtagtttataattattatattttgtacctgtacgtgttgtccttgttttgcacatgtgctttaaagtaatttggttgtgaaaacaacattgtcccttctctcttcttacctttgctacagcggaatttctacaaatggaaaatcagaaagcaaaatattatgcgccaaaaaaaaaaatatttgtcggcaaaaacataatttgaatcaaaatattgataattcaagaatcattcagtctttttaacatttacaatcagttccaacaccagattcatgactggtgaaggagtgactaagccaaaagctgttgtgaaaagatcgagattaggttgcattaattgtcggaaaagaaaaaagaaatgtgatgagattaagccgatttgtaccggttgtttaaatcgaaatattgtttgtgaatataagataaatgaaaaagcaattattggtgaattatcttcaaaagaaaatttaatctccaaaaacggatctgaaattgtttcacttaatggaacaaagatatatgataatgtaccggaaaaaataagtaccatttcaagtctacgaagtattgtcggtgacactgtcatgcgtattttagaacataactactcaaatttgaacagtttgtttgataatgatgaaaatattaataacaataacataacattaaacaatgaaaaacataattctaattctgaaaataatacagaaaacttcccgtcattggatgacttattacctattgactcggatttcttgaacattatttttgaagatcaacctcagtatttggatttgttcacaaatccttctccttcgataccccaatctgttgatatcaaattacctgtatcattaacatctgaggaattgggatattttgaattttattgtaaaagcattttacctaacttatcaattcttccgcaagagttcaactattacacaaaaatatatatcccaattgcatttaaagaaaaatcggttttatacacattagtaggttggggctgtcgtatgagaaagaatatcaacttaaattttcaaattgagaataaagaagctgataattacattgaaatggttaatgaaaatataactcaaaatgaattaacgttagacagagaaaaattcataacaaattttgtttgttacatgttattagtttgtatggagatatcatttggggatacatctaagtggtcacattattttacatgctgttttaatatgattaataaaatgccaggtaattttagatacttattatctgcatgttctattgaaggtaatttattagctgagaattttgcttattttgatgttttagcatcacaatcaaatgaaaatggtacattttatccaatggcagattatcatgatttgttcagtcaaaataactccaataaaatagttcatgatcctttccaaggatgtattagaccaataattttgttaataggtgagattgttagtatgttagtagaatatagttctcttcaaataagtttggaattgccagaatgtgataaatatgaagtcattagtaaaatgatgaaacaatctgaagttctagataaatctatacgatttgccaaaccagatttatcatgtcttcagtatcttgacagttctgatgagttggaatcacatttgactttatttgaagtttatcagttatcttcacaaatatatctgcgacaggttattagaaagttaccccctgttgttcccgaaattcaagttttagcattcaatttgaaagaagatctgaaaattctaattgaggcacccaaattaaaacatagtctagcatttcctatgttattattgggtattagtgctgtcactaaaactgacaggaaggaagttatacaaattttcaaaaaactaatacaaacttgtggttatttaagcagttatcaaaaactactatttgtagtacaaaaaatctgggatttaaatgaaactgggtcattatatatagattggtttcaagttaccaaacaattaggttggagattaaacttgggaagataaaattatttttataaactttcaaatattatatagagaattaatagaagaaaaacgttatttaatgaattatgtttaagaaaaagcatggaaatggtacaagtttaaattttgattatctattttaacttctcatttgatgaagatgataaaattacatcaacattttcaactttgccattgtctagttccataccaatattatcgtcaagatcgggtctcttacctgattcaaagtccatattcattaaattaataattccttttttgaagtagaaatagtcataacagaaccaaataataaaaaatattggaagcatgatgtaaccatcaataaatgttttataatcaaatggtttgaaacatgaccaactttgaaccaatgttaaaacaataccaattacaataccaatataattggaccatgggaaaaagtaagccttgaatggtaaagcatctaatgagtaaccttgtgctatcaaaccttttctgaatcttaagtgagtaatggaaatggaagtccagaccataaaagctgcaacacctgtaactgaaacaatgtaggagtaagcaacagttgaaccagaggagtaagataaaattgataaaaatccaaagatatgaacgaaatgaatagcaacataagggacacctcttttattaacagtggtgaaaatctttggcccaaagcctgcttttgaccatgtaaaaagtgatcttgaagcaaaatagattgctgagttaattgaagaaaaacaagttatccaaatcatagttgtaacaaaatattttgagtttggccaaccagcttcagttaatgcaatagtcattggtgatctcataactttatcagcttctgtaaggaatggatcattgtatggaactgtaataccgtaaaaaattgataaaccaaaataaacaaagaaaactctaaaaactgtacttctaacagcagttggaattgcctttcttggatttctagcttctgcagcaataacagaaacaccttcaatacctgaatagaaaacaccggcataaacaaaagagtttgcaataccttcgaaacctgatttaagagggaaatttccaaaaggattgtctggtttatgaccaggaataccaccggcagcataaataattgcaaatatgtagaaaccagataagaatgataatttcaaaaaaccaagaaaatattcagcttcaccccaccatgaaacatcaagacattgaaaaatggtgaaaataaaccagaaaatcaaataccaaccataagttggaacagttgttgagtatgtttctaaagctgctgtcaatgaagtatattcagcaataatatttgtaatccaaataatgacataaaaaattgcgactgttgcaccaaaacctttagaaacatatttagaagctaaaattgcaaaattttgatcaaatgctgcattcatttcaccaattgaagccatcattgagaacactaatataccaacaattgcaaaaccaacaagtaaaccaactggaccaccggatgctaatgcattacccataccaataaaaacaccgggaccaatcaaaccacataatgcaataagattgatcattctatttttaagacctgctttcaaacctgaatctaaaacatcgtcgattctttcattttcatcttcaaaaaaagcacttgaaagttcagcatttgctgaaacgtgtgaggcctgttgtgttatatttaacatgactttatttgtttaaaaaaataataattttttatgtataatatcaataaaacataagacggatcaagtacgatctaaattataacgacggttagctttgtatttatagaagcttaaaattaatttgaatcaaaagatatataatgactgataacgagaagatttgggacgttcaagacaatcaaaattataataccaatttatcttatctccccagtaattattgaaatgtaaccgagagtgacaatctgtgtgaaatacctgtcaaaacaagtacaaaatctatcaaaaatacccgtatcaccaaaacttttcataaaaagaaactaaattttaaaaaactattgttgataagagtaatattgccaatttgggaactgttgccgctgtttctatgcgacatttggcgcttaagtgagggtgactttatttgacgttaatttgacttcacattagccgttaaatgtcgccaattaacggcgcttgtgtcaattcagtagagtatagttgggttattagtctgatagtgtaaaagagtcaattaaataaaattcattatataattaatggtatatttgccttcaaacaacaaaaaaaaaattaaactaacttttccacaataagaactttggtttttaagtgtatcatgactgttaataaagttgagaatatcgaggaaagatttaataaacttgtaaagaaatttcctatcttagatacacataatgattttccatataatttacgtgtccaattacattatgaattcgaatctacaaaagagttcaattttgattcattattaacatcacaaactgatcttgttagaatgagagaaggtaaaatcggtgttcaatttttcagttgttggattgaatgtaaagaagatgatatgtactatcaggactttaataagccaaatagtgttgttagagatacattagagcaaattgacgtagttaagagacttgtggatgaatattctcatagctttaagtttgttcatactgcggatgaagcactaaaaagcttccgagatagtgaaaccaaaaagatatccatcacattaggtgtcgaaggtcttcatcaagtcgatctctctcttgctgttgttagacaatattacgatctaggtgttagatacatcacacttacacataactgtgataatccatttgctactgctgcatcttctgttactggtggtttacctgataaaggattaagtgactatggtagagattgtgtcaaagaaatgaacagactgggtatgatggtagatttaagtcatgtttctcataaaactatgttggatgttttggaagttactcaagcacctgtcattttctcccacagctctgtatattcacttactaagcatgaaagaaatgttagagatgatgtattgaaattagttaaagataatggtggtgttgtttgtgttaattttttacctatatttttgcaacagcctggacatgacgaagttacagttgaagatgctgttgatcatatcaaacatatcgtcaatcttattggatgggatcatgttgggtttggttctgattttgatggtataccaaaaggaccagtaggtcttgaagatgtttccaaatatccaaatttaattaaaaaagtttgggaagcaactggtgctacagaggaagatattgttaaaatgatgggtatgaatgttttgagagtatggaaagaatgtgaaatagtttccgagagaatgaaaaataaaataaaacctgttgagtctaattgggaccaaagagaatggatattctacgaatactgtagagaatttcctgaattattccctggtgcatataaaatcaaagaaaaggaaaatatttacaaagatactcaaaagcttgtttaattttcatcaggtatatagcatttagaactaaaagttttgtgagagtttgagcaataataatgttagtaatatattgtctaccaagcttcggagttcctagtcattaacccatctcatctcatccccggtatagactatgtattttataaacttacgtaacataaaatgttttctggcatactgatttaaagccgttcttgtgccgtatggattttccgtattggtttaagacactctaatcggataatcaacaaataattttgataatcaaggtgcagaaggctgtttcattaaccttaaaaaaattactaattatatttgcttctttctagtcgaaagttacatatttttcaacaacaaatgactgttaacaacatagacgaaagactagataaattggtcactcaatatcctattatcgatactcataatgattttccttatgccttaagattacatttacataatgaaataaaaactaaggaatttaattttgattctttacttacatcccataccgatttaattcgtatgagagaaggaaagatcggcattcaatttttcagttgtttcattgaatgtaaagatgatgattatttatatcaagacttcaacaaaccgaatagtgctgttagagatacattagagcaaatcgatgttgttcagaggacttgtagatgaatactctcatagtttcaagtttgtctatacggctgatgaagctttaaagagtttcagagaaaccaaaggtaaaaaaatttctgttactttaggtgttgaaggtcttcatcaagtcgatctctctcttgctgttgttagacaatattatgctttaggtgttagatacatcacacttacacataactgtgataatccatttgctactgctgcatcttctgttactggtggtttacctgataaaggattaagtgactatggtagagattgtgtcaaagaaatgaacagactgggtatgatggtagatttaagtcatgtttctcataaaactatgttggatgttttggaagttactcaagcacctgttcattttctcccacagcttcatgtatattcaacttactaagcatgagagaaatgttagagatgatgtattgaaattagttaaagataatggtggtgttgtttgtgttaatttttaccctgactttttaatacaggaaggtcatagtgatgttaccattgaagatgctgttgaccacattaaatatattattaatcttattggatgggatcatgttggttttgggtctgattttgatggaatgccatgtggtcctgttggcttagaagatgtctctaaataccctactcttgttaaaaaagtttgggaggcaactaatgcgactgaagaagatatcattaaaatgatgggattaaacgttcttagagtctggaaagaatgtgaattagtctccaataatcttaaaaataaaattagtcctattgaaacaaactgggatcagagaaaatggattttcagtgaatactgtaaacaaatgcctgtattattcccaggtgttgaagacgctattgaaaacaaaaacatttatgtaaatcatcatgaataattgggtgtaatgccttggacttagtttttttagtttgaataccattagtttgaaaatttttgacgtgatattttaccgcccgcattttttatcaactgcgcttatcaaccgccaatttgattcctagtcttctccaaaaaacttggaaattcttctttataaatgagatctaaattcttatttcttttttagattaatattatattagtcttatcaaacaagcaaaaaaaaaatagtaatgccagaagtagttgttttaggttgtggtattgtcggtttatacaccacatattgtttaataaatgacgcaggtgtttctcctaaaaacattactgttatggctaagtatatgcctggtgatcaatccatcaattatacctctccttgggctggtggtaacttttcctgtattaccccaaatgacaaagaaactttagctttagataaatttacatacactaacttagccacaattcaaaaaaaattaggtggtccttcatgtggtttagatatgtatccaagtactgaattatgggatgaatatcctggtgacgaaaaaatcctatcactaaagagttatatcaaagacttcaaagttattccaaaatcaaaattacctgagggtgttgagtttggtattaatctaactacatgggatttcaattgtccatatttcttagctaattttaaaaaatactttgaaggtcttggtgttaaatttatacaaactgaattaactcacataagtcaagcttacaaacctgatactaaggttgtttttaactgtactggtattggtgcattttcattatccggtgttaaggatgataaagtatatccaactagaggtcaagttgttgttattaaagcaccacacattaaacaaaataaaatgagatggggctctgattatgcaacatatatcattcctagacctttttctaatgatgaacttgttcttggtggattcttacaaaaggacaactggactgctgatacctttgaaactcaaactgcagatattatcaagagaactactgagttattaccagaaatcttagacagacctttagaaatcattagagttgcagctggtttaagaccaagtagacatggtggtccaagaattgaagttgaacatattgaagataaattattagtacataattatggtgctagtggttatggataccaagctggtttcggtatgtcccataaagcagttgctctttacatgaaagctaagagacaacaatcaggaaagctttaactttttagaaaatttataaacatttttatttatattactatcctttaaattattactctacaactatatttgatttaacacggtatactcagtttttcgaaaagaccgtttgattaaggtcggactcaacaaagcaactccgaaaaaaacatcgtgacagttcaataaatttaagcgcaaattcaagcgcttaatgtcgccttacgattcagcttacattaacgcttatattatgcatgaatcatatagattgcttcattactcctaacatgccatttatggcaaagtggtacgacttggatatcaatttttagggtctggtttactattgatacattaatcgaagtataaaagggagaatagtttcaatgttgaatcaaatatgatctttggaaatattaaattagacaagatcaaaaaaaagtgaaaaatgtccaatgttgtggttttaggttcaggtattgttggtttatatactgcgtggtgcttaattcattatgcaaatgtaagtccaactaaaatcaatgttattgcagaattccttccaggtgatacatcaataaaatttacatctccttgggcaggtggtaatttttcatgtatttcaccaaatgatccagatacattagcatacgataaatttacttacactcatctaaaagatatcaaacaagcattagggcaagaatgtggtttagacatgagaccaagtactgaattttgggatgtttatccgggtgatgaaaaaatcaattctttaaaaagctatttaaaagattttaaagttgtaccaaaatcaaaactacctgaaggtgttgcatacggaattacattcacaacatggaatttttattgtcctttttttatttcaaagttaagagctcatcttgaaaagttaggtgtgcaattcaaaagacaaaagctaacacatatttcccaagcttacattccacatacacttgctgtatttaattgtactggtattggtgcagtttctttatctggtgtaaaagacaccaatgtttatccaacaagaggtcaagttttagttgtgaaagccccacatattcaagaaaataaaatgagatggggagcagattatgcaacttatattattccaagaccaaattctggtgggcaacttattttaggagggtttttgcaaaaggataattggactgcagatacttttgaagaggagtccaaagatattattgaaagaacaaccaaattattacctaaaattttagataaaccaattgaagtattgggagttgcagcaggtttacgtccaagtagatatggtaatgctaggatcgaagcagaaataattgaagatagacttttaattcataattactggtgctggtggttatggttatcaggctggattcggtatgtcccacaaagcagttgaactgttcattcaaaataaaaaactttcctcaaaattataagttaaatttttctgtcttttcaacattcaattagttcgtttctttataaaatcttattcagtaaactatttttaatatataaatctaattagaattaatcatctatctatgatgcaaaaatctagcaaaatatttatgtgggctctaccaatatttccaagagtcaatagaaccacaaccaattgagttttcaatttcatttgtgtcgttaaaattaataaaactttcaacagtcatatattccaaaagctcagcttgaggtttagttaacaaaccaacccccttaccacctaaagtagttttaaaggtttcaaacccattatcgtcaaattttttcaaaagtttttcataagcttctgtatcgtaatcatcatgtaatagtgtgattgcacatccaccaccaccggcacctgttagttttgtttcacctattttaagttcatcgcaataaagtttaattctttctaaatttggatgtgatacacctaatgaaactagcaagccgtggttgattcgaattaattccattaatctttgctttgattccggatctaggaatgggcgaaccattaaattataagcttcacgagcaatagcttcaagtgattccaaaatacaacctgttgtctttggaaatcgttaacaattctagcaacatttgaaactaaatctgctgttcttctaggagttttagtatttgttaaaagaagattgattgaaggtaaatttctcattgatgtacgaacacttggcatggaatttgtcattctttggaaacataacggcaccaccatgagttgcaacggcattatcaataccacttgggttaccatggatacatttttcacccatgtaagaccaagcatcaataaatttacattcatctgaatcttttacaatttttgaagatttttccaatgatgcttctttgatatgaccacctatatatgcaaaaccacttgcaagacaaactgaaatagatgctgaagatcctaatccggcaccaataggtaatgttgatctaacagtaaatgtaacaccactttcaaccgaattattacatagtgacacaaataagtataagaaacaatatgcagctgtgtagtgtaaaggtgatgagattgtagttaataaaggtgtaagaccatcgactagttcagcattaagttcttcacttgcaggtgggataccttgttcatgtgtagttaaatgccatggtagttgagactttttccatttatggctcaaccctatatctgggaactccagataaatatgttcatctgctggatcatcatttttggtaacaagtagatatgttcgtaaagaaagagctgctgcaattgctggctatattttattaaaagtttgggtgtgttagtttctagaaatcatagattgaacaacatgtttatgttgaatgttgaatgttcgaagatatacgtaccttattataaactgctgaatgttcaccgaaaagaataacttttccaggagcactggtcaaaaatggataatctaccatattttttttcaattgtttaagtgactaagtgacgaagtgtgaattgatcaattaaagatatatcgacatctaaatatatacttctctctaatcgtatagcagctttaacgacagtgtcagtcttgaaaatggaaagttttcaaaattatacgacgcgacctgctccaaatacggaatttaatttttttgctttcactgcctgaaaaattttgatactaaaaaaatttttattaacaaaaatttaattactttaaacaaagtatatagaatagagaccttcaatacagttacagttagatactttactatcattaaggaacaatgtcctacaaccgaaaaacaatcaaaggatcaaattaaagtgaagtttttcaccagagatgaagatgaatcacttcatgtttcctcaaatcctatttatattccagtaacattgaaaagatttggtttatcagagattgttaaccatttacttagaaacagaaactgcagtcccttttgaatttttaattgatggaactattataaaaacagacattcaagattatttagtcaaaaacggtttatcaacagaagcctttttaacattagaatatacaagagctgttttaccaccaaaatttttatcaagttttaataatgatgattggctcttcatctatagattccataggatcaatggaattaccaggtgctaataatggtgaagctgttgttactgctccaaagattttaactggttcatatgatggtattgttagaatttataatgcatcaggtaaagttgagacacaattaactggacattcacaaccagttaaagctgttaaatttataagtcctaacaagtttcataacagcaggtatggatagatctatcagattatggagatccggtattataagtgatgaagatgttgaaaaagatacccaacaaggttcaacttatgcattgcttgactatcataaaagtacagtttcaagtttggcattaaatatttcaacaaatagaattctttctggttcatatgataactctattgcattttggtcaactaatccaaaagaaatgaatacttcagctccaattgatatttcagaaaaattatcatcatcttcaagaaagagattaaagcttgcaataaatgattccacaattagaagaaaggcaccattggcaattcttgaatcacatagtgctcctgttgaagatgttctattttcaaataatgatcccaactattgcatattctgtatcacaagatcatactataaaaacatgggatttaatgactgcacgttgtgttgatacaaagcaaactaactactcgttactttcattagtttctttaaataatatgaatattctagcaacaggttcatctgcaagacatataaacttacatgatccaagatcttcaaaggttacaagtagtcaacttattggacatacaaattttgttgtttccttagcaacaactgataatgaatatatgctcatctctggttctcatgatggaactgctaaagtttgggatattagagcaaataaagcaatgtatacaattcactagagaatctggggaaccaaagagtaaggttttctcagttaactggaataaagaaataggtattatgagtactggtagtgataaaaagcttcaaatcaattcaagtgctgaatttaaataagaatctatgtgtaatattaattgattgtttatttatacatgtttataaaactaacattatcgtaatttataggggaatgaatcagtttatggctttacagcagtccatttagtaacattatagtaaccttgccataaacctttcctatcagttaaataacctaagagttcaggttctacttcatctgtgactttccatcctaaacttttaatcaatgttttgagttcttcgtctgatagttcaatctgtgctgcagttccatacttcaatggacctacattaatccattttgttgttccttcaacttgggcagcaattctatcaattgattgaatatattcaaccaagttctcagcagtatccaagaaaaaacatgtaacgataacagcatttttgggtttttcattagctcttaaatgttcatttatgtcaaattttgtaaaatcggctgtatgaataaataaattttccggtttttctaaatcatgttgaatttcaactgaacggatttgatcattcgtacttaaatgattcgaatatgtatgtaaataaggataaatttcaacttgttttcctttgttttccttcatgaacaagtattcgttcattaaaaccattaaccaagaaaattcaactgcatgaacagataaaaaatttaaatcgtttgctaatgtatgtgcaactttacctaaacctgaacctggcactattgctatggtgtgttcattgtttaattcgtctgcttgttttttgatataatttattaatggagttatttcatcacaaggttttaatggccaatcacgagcataatgacataaactttcaacaactctaaaataattatttttttctattcaacttatactgttcctcaacaattttcagttcataatctttaattttgtatttttcaattgaagttagatacgattgttgataatattttattatttttttcaaaatatttatctaccatgtttaatttcttggcataatttgtgacacttgcaatttgttgttgtaatggtgacattttcttgaaaagtattctacgcttattattccatttataagcattttgtaaataacttttaagatcgaaaattgaataaagcaaatctgttcttgattgatccagtttaatttccttgacttcatttatttcatatgcatatttatgaattttccttttaaactttgcagcattgttgtttgagttataaccgttgtaaataataatgtacaaattataagttttatttggtgtaacgattgaggtagtatagaatcgaatacaaggtacaatattaagataattgatattctagataaaaatatagaagtttctccaagtgtttctttatttatattcactctggacattcccttattgagctaaaatgcatatatgcatgtatgaacatcaaaaaaatcaaattctaaattgttaaaaccattggggtaacaaaatttaataatgttatatagtatatgggaaatttcccaaaacagaagagcttactttttttgcagaactccccggatataacgcgcattattagaatttcctttaaaatactatgtacagctcaattgcattttagtactgtaaagttctgcaaattttataagcacataatcaccttttaccgtttgaaaaacgttttgttagtctttcagttttaaaaattagtttattgttagttttaagactgtttacgtaagttttctgatgattcaaagcttcttctagtttattcttataagttttcaaaatataaacatttaatgaagtctatcataaacataggaacggatttacataaacttagtcgttttactgaaatattgaaaagaaatggacccctttcagcttttaaaaccaaaaggttctccgaacgagtattgaacaaaacacatgagatgcctctattagaaaaatacatcagtatgaatgatatagagaactgttcaaaagtattgtcagtttcttggtgtgttaaggaatccatttacaaaacattagatgatgctgatcaaactaatttcaaaatgtctgactggtataaaattaatgatgaaagaggtcgacctataataggtaatgaaaattataaactattacatccaaatgaagagtttatttgtagtataagtcatgatggtggtttaatcacatcatgtatcattcgtcagagtatgtgcaatgtttagtagttctttatgtgaaccttagtatataaattattaatattagtataaaatttcagtgtctagaaaataaatgaagaaaagttaaacaattaatctattcccattcgacagttgcaggtggtttagaagtaatatcgtaagtaactctagcaacaccatcaacttcgttaacaattctagaagcaactttctttaaaaatgcagcttcaaatacaaaccaatctgcagtcatgaaatcagtagtttcaattgctcttaatgcaataacttgttcgtaagttctttgatcaccaacaacaccaacagatttaacaggtaaaagagctgcaaatgcttgggaaatttggttgtataaaccatgagctttaatttcttcaatgaagatataatctgcttctctagcaattttaacttgagatggagtaacttcacctaaaactctgataccgatacctggacctgggaatggatgtctccaaactaattcatctggaatacctaagattttacctaaacttctaacttcatctttaaataattctcttaatggttcgattaactttaatttcatatcttctaataaaccaccaacattatgatgagttttaatagtttgagatggacccttgaaagaaattgattcaataacatctgggtataaagtaccttgtaataaatattcaatatctgaaccatcctttggcttaatttcagctgcaactctttcaaaaacgtgaatgaaagtgttaccaataatctttctcttcttttctggatcagtaataccctttaatttacctaagaattcatcacctgcttcaacaacagtcagatttatacctaaaccttcatctaaagttttcttaacagtaacagtttcattctttctcattaaaccattatcgacataaatagcatgaaatctatcaccaattgcttccttcattaatttagcaccaacagtagaatcaacaccaccagagacagcaccaataacttcagcagttggaccaactaattgtctaattctcttaatttcagtttcaataaagtttgccattgtccagttttggtttgctttacagattgaaactgcaaaattctttaataagattttaccttgtaaagaatgggtaacttcagggtggaattgaagaccaaaaattggtttttcagtatgtgcaatacttgcatatggggagttaccagtttctgcgacagtcttaaaaccatttggaagagcagttaatttatcattatgagacatccaaacttgagagttgttaacacctttgaataattcacaagcttcatcaacaacgttaacaacagctggaccatattctctctttaaacctctaccaacacctttaccattaatccaagctaattcttgcataccataacaaatacctaaaactggaacattcaggtcgaaaactgctggatcaacatgaggtgcaccttcttcataaactgaatatggaccaccagaaagaataacaccaactggtttgaatggtaattcactgattttttgagtacatggtaacatttcagcgtaaacattaaattctcttaatcttctaatgattaaatgagaatattgggaaccaaaatctaagactaagatagtgtcgaaaacttggtgagctggagcagtttcttcaatagcagacatggttaaatgaaggttctttttttacttattaaagattaaaataaaatagagatttatagaaatacatcagagcaatgaagaagctcaaaagaagaaaccaaaccaattaaaagtaaaagaagaaaaagcaacaacattagattggaataaaaaaaatttttaatgaaatatttattagtcaagataaaattagaattccaaaagaaaagagcagcgctctcagtaaattttttggctaacgaatttataaatttttatttgagcgctccaatattattttgaagagtcacattggtggctcaacagtttttttactgagcttaactgtgttttatttcatttgcatgattggatgtatggttgtagattgattaaatggtagtgtaatatatatttttttagacctttgtaaactaactgtgttttttgccgaaaaacttttaaatgaaatttttaatttttatcatcaaaaataatttaaagattttaaaaacaccattgatatttgtaaaaagattatttttttttaaaaaatgcattatcttttgagcataaaaaacatccaatgaacaaacagcaacttcaacattgcagtttactttaataatgcatcattgcagttgaaataagacattattttgtcaaattgacctcagattacaacattttgaatgtcgtgggtatattgcattgaaaatgacggcgtggagtcgctatacattggttaatgagatcagtgtacacgaaacaccaaaagatgaaatcaattgaaatgcaatttatgatctttttaattaaataaaaaacgatttaatgaagagaggatcactaattgtaattgaaggtttggatcgtacaggtaaaactacacaaactgaatatttattaaataagtttaaagagttaaatattaaacataaacttgtaaaattcccacaaagagatacccaaataggtaaattgattaatcaatacttaactgataaatcatttgaactaagtgatgaagctgctcatttaatatttagtgctaatcgttgggaattagcttcacaaattaaagatgatttgaataatggtattaatatcgttcttgatagatacgtatattctggtgttgcatattcctctgctaaaggattagattctgagtggtgtttatctcctgacaagggacttcctaaacctgatgttacgattttcttaaaatttcgaaatatagatgaaatttctactagaaaaggtttcggtgatgagaggtatgaagttgccgaatttcaagataaagttagaatgatgtttgaaaaattcgaaaataataaagaattttcaaaagtttttgttgataacttaggtaaagaagaagttcataataaaatatggcaaataataaaacctttatccgaaggatgtgatgaagaactttcttttttctaacttgtataatattctttgatctaataacaaaaatttattacattctatttactataaatcatttgaataaatagacaattactaaaatacacacactaaaattcattttctgataagctacgttattcagaagtgaaaaaagtaaaaaaggacaagtaaaaacaaaagagataatgaacaatcaatattgaaaaaaaaaactattatacattatattgcagaaatagtaaagtttattaactcactttaaacactaaataataaaaccaaactgtttccatctatattaaataacttcgagctttcttcatcattattttcaaacaaaagccaagtttgcgtacagtgataatattgatgtgaaaagtgcatcaagtaaaatccagtttccaaaaacgtttcttaagttaaagacagcaatgaggaaaaagtgtttgaaagtaacaaatttgatatcaccaattgagaaaacatatttaatttcatcctttaagttagctaaatcaatatcagtcttgaaaactaagatagctaagaataatttagcaagagattcagtgaatgcatctctatcaaaatcgtaagtgaaattaacatagtatgagaacactaatggtaaagcttttgaaattaaaccccagagtaagaatgttgaaactgatgcagtactgaagatttcaaatgaaagcacaggaattttagaaatagtagttggtaaatattcaagtgctttactaggtaagtatgaatcaagaggggtaagtgaaattaaagagtaaaataagtatgttgtttcaatataataagctaactcattgagggtgtatggatcacctaaataatctctaatttcatagttctttaactcaaagtattctgataagttgttagttttgaatgctttgacaatgttggtataattttcgtaatcaaaatcatcatcatcatcgtcatattcataagtatcatcatcatcgtcatcatcatcttcctcattttcgactttctcatcactatcatcatcttcagcttcttcagtttcatcgtcatcatcatcattgtttttgttttcagtttcttcaatatcaatgtagacagtcttctttggtgatccaagtttagctaatgaggcaatttcatagtattttgaattttcatcaaatttatctgcattgttgacaaagtaagcatgaactacttcgtagatttccttcttgactttacagtcagtgatatcaatattgagatcctcagctatttcaactaattgaccctttgttttcttagataaggttgacattttctcttaatgaattgagtttttctgtggattggttttcaaagataaacaataatatgtgacttataaaaatatatcaaaacaaataattagccaattcctgaacaaaataaacaaagattgaaaacattgggaactttgaaagaaaaatataaacattcaatcagatctttatatcagtgaaactcaaaaaaataagtttcgccctacattgttatttatcttttacccgattaggaaatttgttttacttttgtttccaacatgttttgttgaagattgaatttacagacaaaattttatgttggtccacgtgaagactatttatattaagcttctaagtgtaattgaatggtgtttagtatatgttaaatacacattaattttatttagaaatatcacagaagtgtgcttttatatgcccagtaatttttacgtataggatctagcctttcccccaaaagtgtgaagatttctctttgtttatctgataatccttgggttccgtagattgtcgataacaattcaaatgctggaatagaaactctctctatgttttgatctaatttagatttgtcaagatcggcactgaatttgtatactattttctctatatcagtaacatcataattcacgttaatactcatatcatataatgatttcatgtaattccatgatgatgggttagtaattgacaattcaatcatctttatagtaaaattaatctcagaacttaatacatctgttgatattgttttgatttcaggatttccaaataaaagaaaatgcctaaagttccaagctgaattgtttcgtatatcgtcttgtatcagtttagtagcatactcaagttctgttacatcattgaagagagaaaaatattgcacaaaccaacgtttatatgaccaaacatgatagtttttttcatctttctcaagcatagttcctacaatttcacgttctttctcaagatcgtattggcttttatcaccatcaagttcttttttgattatcaattcaattatcatttcacgataatgccatatttgataatttttttgattattaattagctgtatttgaacaccattttaattcatctgataaattgaaattttcagtttctattaattttttgacaatatctaatttgtattcccaaactgtataatgtgcaggaactaactcaatagcacgacatgcaacatataatgctctttcacttagctctttttttaaaagtaatgcacgtaagtaaccaaatactgtcttgaattcttcagtgtacatgattttacataaaactacatcattgtcatcgataactggcactggtgtgatatcgtcaaaattatattcttctgtattcattgtcatttttggaaactttctattcctctgtaaaatgtttaatactagctatatcttgaagtcaactatagaagtgaacttttattgaaagaacaacgttttaagatgttatataataaaaataatctccataaactgaaggagggtatgaaatttaaaaaatttcctattccggcgaactcaatatagcttatctttacaatttcagataacatgatcgtaaacgatggtaacaattatctttttactgtctttttaaaaatggatactcatattaatacataataaactttaagtacactcaaaataaacttacttacttgatagaataatcattaaaacatcattttactttcatttttgctaaacaatcatcacaataccattcacctttaggtaattctttcaggccagtacactggtaaatgaaaccattctttttcacagctttcaccatcacaaccgaccatttcaccatatgacacttgttgacaataacagtagactggctcaccatcataattgattggtgatgtagcttcttcggttttagtttctttctttgatctattaccacgactattactatcagatacaccaccatttttactcttaccactggcactagcattcaagttcgagcctattagtttctttcttagtctcttttcttcttgatgttttacctctcttagaagtgctatcactactattattattattattattattattattattattattgttattattattattcactaaaacagaggcagaattataagtttgttcattttctccagattttctctttcttgaagagtttgacgctccgtttgcactagaaccacttggtcttgtgattattattattttcattgttagtgttattttgataattttggtattcagtttcttgagatttatgtactccagtgttcaaagctttgagatcctttcttgaacctctagacgatttcttagaaggaccagatgattcttcacctgcagtattttcatgatcatcttcaaatcctcctttagctcttttagcagccaaagcttctcttctactttcactacgttgttgatgcgtactctttggttcacttaccttcatacatggttcccacattggaccaattctaataatttcgggtatttcatggttaattacaatattgtatgctcgatccattcttttcgtatattttttaacatggtctgatgcaattgttgcaacatgcattttttcttccaaacatggcattaactcacgtatacaatctcttattctagttaataataaccctcttttaggatgatcttttctcatggttagaaaccttttaatatatgcttctaaatgaggaacagtgtagacacattttgcttcaatttcttttaataaagtaaaatagtttataatatcatttggaagagcactaatattatcagtaagttcatttaatccataacaaatatctgaaggttgtggattcgtgataggatcatgtatactcttatatgcagagtcatcaatttgttttaaactcattttactctttttcaaagcttccctctgttttcgatcttgtatcctaatagatttgttacgtggtggtagattttcagcactcattgattgatacaaaatatgttattgttgaattgcagataaaactcagtgcaatctaaatgtaaaatactgtgttttattctgtagaagaaatttctttatcgatgatgtccttagttagttaaaaaagttaaatttcattagctaagccgacgtaacgacgctgacggatcagtattatattttttaaatctacattatactaacatgaaatttttcattttttcagattgatgtagaaatttgaatgttaaactgttgaactttcagagtaaacaacgttatgttgtcattattagtacgaaaacaccaatgtcaaagttacaatagttttggaaatatacttacacgtttttttcatacaaaaaatgctggtccatgggcaagaattcaaatagataatgtcagtgttgaagaaagatcaattttatacgaattagaggatcttgaaatgactgaaccaccacaaagtaatataccgtttttagtatataaatcctttcctaatgaagttaagtatcctaaaaaaccaaaaaattggaacgatgagaatctatcatcatatatggattctataattagtaaacatcatcttcgtagtcaatggaaacaaataaatgatgatatcaagaaattgacatatgaatttccaactgcttttagcaaagaacaatatatcaaaatgcttttgtttcttcattataccaataatcataaattgaaatttgaagttttgaaccatatgctagagaatacaaatattaaacaagatattgattttcataatattatgatatctccaactactaaaccaccaaattatccaaatttcatcgatagactatcatcgattcgtgaaagaaaacaaaaaattaatctgaacacatggtattattcatttttaaccttaaagtccgaagatgcaaaattccaattacttgaatatatgcatgataataaattatcaatcttaccattattatcacacctaacaccaattgcccacaaaatttctcctcaagatatgaaattaatattggaggaaaacaacatagatttagaaattggtactggagacaaaagactcgattcaatttactttgatgaaatgttaatttcatatttgaattgggaaggtccagaggaagcatggaaatttttgaaatcatctaaaaaatttgaaaagtatttcaatattaccacatttgttactcttgttaattatttcagaaaaaaataatcaactgggtttttgctttgctttatcacattatttttacactcgttatcatgttaatacattcaatggttttgttaagtattttgttcaatacacatttaacagcatgcgaaccatttgataagtggcgtgaattgacaatggttgcatatgatgctaaagataaattctttgtcagttcaggaacgttatcaagtttacatgattatgcaacgttacacaaatttgatccacattttgaaaattttacagatgatgaaaaaaagtttagaagtaacttattttattctcttcgatggagtaaagaacctatttttgaattatccaaaaataacaatgtttttaaaaagatggctaaactaattggccagaaagaataatttataaaatgctactagatgttcaatatttactaaaaattcgtcaatcaatttgaaaattttaaatgcatgtagttataaaattaaagaaacgtaagagaaagaaaggagaaaaagagaaatgtagatttatagaaaactaatgaaacgaaaaaaattagttgaaattctattgttaaattatgattatgtagcaaaatttgagtaaactgaaccatttataaaggtctttgttttttatttggattcaatccaggctcataattggtctgatataatctcttattattgttagattggtcaatactttgattatcccgtatcatttggttattaacattatcatttatcaatgtatttgacggtgctaaagtatttagttgggcatttgtaaagtttggcgtgtgcaatggtgtctctgtattgataaatccatcaatattattcagatcaataggtgtggcattcaaacttaagtccaatggttgttgaaaaaagtcatcaacttcaaagttctctggtaaatcaatttcattgggatccaaattatcattatatttgttgagccaattgtttgcattttttaaagtactttcatttttatgaagttgattttgaatatgcgtaattatattagatgagttttgattcctttgttctgatagagaactagtttgatgatccatttaaactttgtatttgattattgcttgcttcagacattgaatttctttgatcgacatcagaaaattgtcttggagtgttaatgaagtctggcatttgtcttacatagtttgtttgcacattggaatttctattctcagggcctctttgaatttcatgaattgaagagtcaacactaccgtcattagtggctgtttcataatttaaattattcattctaacttcatttggagatctagctgatttagatgatggtgttggtgcgtttgaattgaatccagcacttaaatcaactgaaccatttgaacgatttgttatcattaatcttcgtccattagtaccattgtcgttcatattattgttaccattatgcatagatggcgatccataggagttatagtacggtgcagcctgaatagcattactgcggtaatctgggctcgcaaattgttgatttggactagtattactttctgcataatagttgttgtaacgattattttgtaaagctacttgatttccaccttgatagtttgaatattgattttgttgatcataccttctagaatattgatcacttgtcatcaccatagagttaggaatatttgaacttctattacgattcatgttattattatcattcatgttgttgccatagttgttatcattggtatttagatttggattatttttggatctgccattcatgttaccattattaaaaccgaaacgattcgaattggggtaatcaaatgaattgatttcaaccaaatccccggtgttaccattatgcatttgttcaagtaaattattggtgttattaccatatatgcttgccaagaatctcatgattttatctaatgtatcagattgtattttatgacgttctcttgcaatgaagttttccttccacaacagctcattatcatgtcgaactcttcttagatcttcagttatcaaaagttgattccttttcataagctctaattgctccatcaaagcttttatatcatattcttcctcttctgcatgattagctggtttatttctgactatattatctagtaagtcttctcttcctttgatgaaatttttgttttcaaattgccatatttcctctgattgtatcagtgatccagcagtaggatcttggacttttctccaaccatacatattaagttgtctaacaaatgatgcaaaattattatgcttaaaatatttaggtaaaacttccttcataaattgttctctatcaaacacttgaatcacatctcctggatcaacccatcttatgtattttgaattcgaatcatcattcatcatttgccataactttataacaaacgcaggtcttttattggattgttgagacgatatctttttaacagctttgggtttcttaataacaggtaagagttttgtatcattcggtatattcccagcatcattgctagagtcaacaacagtttgaagtaaatcattgttacccaatttattattaacagttgttaaagaagaattgatatcatctgctggaataccatcaatcgtattgataaaggtggaatctttcagcagctcatttgaaacatcatcattttctatactaattgaattcaatatatcatccttattaagaatttcattactaaggacatcatcaatatcatcatcaatagtacgaatttttgcctttctttcattttttgtattctttttatctttaatatctttagtatgttttgaatttgatagattgtaggcaccggtaatatctggatcaatgggagtaatatctttcaaatgagttgatgaaacattagtactaacgggtgatattacaggaggattcactttgtcatttatgattatctcattactgctgttatctgggatgagtgatacattagactccgtatttgaaatagaagttgatgagattcctatgactactacctttgagattatctgccattatttgcagatattatatgattgttaaccgggtattgtctctaagcctttgaagaaaatcgatgaattatttgacaactcttcaacaaggaactaccggttcaaaaaaaagctagcggggttcttcaaaaaatacacacttcactcgctctattacagcaaacattaaatttatagtgtgaagtgtttgcaaattgatgaattacaatggattatctcatgatttggttacttccactgggttacataattgttataccatcggaaatgattaggcattatatttacaggattgaaatgttacacaaagtttatatataaaatgagtctattggctgagaacacgggaagtatctacagctaaacgaagtctacgaacaagggcatcttctatttcttcagtatcagcatcagtggtattttgatcagaatttaaattgaatgttttgtagtaagttttattttgtccatcaggtcccttgacaataatacacttcaccaccagatgatatcttatcagagaaaaaaacagttttcaatggtatctcttgttctgcaattgggatcttcatgatatttgaaatattcttgatacgactgaaatctccatcgttaagtttcatgaccgcaaaagtgctaaaactaccatactttgtactgatagtatcttgtatcgaatttccagagtttgtgacatgatcaataattgagatatcaacacccgggacacgtttacgaactgctgacaaagtttccctcaattcagctaaattattacttcccacacaaatcaaactcatattctctccattgttttctttgatattctttttgattatgactttggtaatgatacataattgattttgaaaccttgaaagtgtatgaaacaacttattactgttgtctgtagattgtgaatcattatagacgtttaagatgttaccatccggtaaaacacattcaaaacctgaaatgtcattgatatcaaatttattagcaatgattttagtatcagagttatttgtcctaataccacatcccatcatgaataaatcaactggactcaagttgttatttagtttgtatggaacagcatgttttttgaaagtttcccttatttcatcatgggtcatagtaaatgttaaagcaaatgcatccacgtatttggaagaatcatcttcctttttgaacttactgaagttcatttgaaaggtgattaagttattattactactagtaatatcaccaacatagattgggattttaaattcagaacaattttgcattatattagaaacatcctgtgtagtttcgggataccaaacaaacaccttaccttcccatgatttagggtctttaccaaagaagacttgactcatactttcatcatcattcatgacatcagcaatatgtgagttacagaactcacaatcatataatgattcattttcaccatattttacatcaactttgacacctttattctctaatattcttaatgcacacctcttaaacatatcatattgtttgttctctctttctttatcttctttttcatacccaactaacacgtttttaggtgttattgatccgttaggaaataatgtatcaggcggtgaagttaaaatggtagttttacctaatgtataacctgcacccatggcaccaacaattaggaataattgaaatgagaatgatgaatcaagtggtgaagatgattttgacgatttattattccctgaaccaccattggtattcttgttaagtatattatttggagaaccggttttagttggacctgcaataatagtccttctgaacccattacgaagcaatttatttgatttatcaatagatgccaatctattgaattgcggtattctgatcataacacttatagttgtttgtttattgaattattctactcgaaattttgttcacaaaagtagattcatcgattaaacatgaaatttttgctacactctgcacgtcgtgatgaaattgtgaataatttcaaccgttatgaatagttgattttactgaaaatattaaatgttactataatctatacacaacttaaagtaaacctggtatatgtctaagtagaagacaatacataatctatatacaatttgcaatttgaactttcataaaagagagatttggcacttttatttcatattttgcataaaattcttcatctttatacgttcaacattttgtttcttgatgattttacgattgtatctgtaccaatcttcatttttaagttgttccatttgtaaatctttatcaagcaacccccagagccagtctggatattcttcatcttttaatgcaacaattggtttccccgtcttgtacacatttatattgattttagttccttctttacaggatgactctaaagctctacagctagtactaaataatcttgctgcttgtttaaacatccttgccgctgatctattgattacaatcaaatgaaaaccaaaagttttcttccttttaacttaaggtgaaatttcaccactgaaaatccatgataattatattcactgtgcgaggttaagagaaaaaaactatcattttaaagcagtcgcgtctttttacgtaaaatcactaataatatgtaagtacacacagttaaaacgttattgaatccttttcaagagagagttggggtggtatctgattaacatcaaagtctttggacttatcagtgaactttttacttaaaatgatgtttttatatttctcttttacaattaaatccatttgctcatcggaggaaatcaataatgtagataaatattcatcaacgaatgcaaaacgtaatttaactttatttgctatatttttcattatcctggagtaaagatcatcaacacttatttttgattcattaattaactctagttttcccattcttgccttacgagctaaatgcttgtgtattgccttatatcgattcattaaagaaaaagctatgattgctaattcttttttctcatacttcttttgtttgcagatgtaattaaaagtagcaatgcatttccaaattttaccatcattaagcagtccttcaataaatagtatccatgtctcttttgttacaagctcttcatatttacgcagttccctgaatgtgataccatccaatctataatgaacacagtttttaatgtagattttaaatgcttcaattttatcttctctattatcatcaattattttctttctaacaagatatttagagaatctatcaaaagtgaacttcttattcttttcggagaactcaattgtagtatagtcttcacatatttgccatttgacatctttatataccaatccttcattaactaatgctttgagtatggataatctcttctttgatgaattttgagaaatacaaatcaaagttttcgttacaacatcagtaggaatttcccattttttaattcccatctgaatgtatctttcaacaattcttttacgaacaaatttatcccttatttttctcgattcataaattaataaatgcaatgtatctttagttggaataatattcattttttcaaatctgaataataataagaaaattactttgttattccttgattctaaataaaacttgagaaattcatgcatagtcttaacagtccaaaatgccttccagctttaaaatattatgaaccagattagtcatttgtgcatgtatagtttttccagcattattcaaatcataatttaagtttattgaattcacattcttcaaatattcgtatagattctccttattgacatgttttggaaattgaggtacctgaaatgtaaaattaatatttttcgtctttatctttgacaactttcccataaaagtcgtcaagtgaatactctttttcacaatttttatttttgtcaagcttatatttagctttcaaaaaattagttctcgttaattttatcactgggtcttcacatggattcatctttaaagcatgttcactagatttatcatgttgtttcaaatttccatcgtttttacttatattatcttcatgaaacaatttctgtatctcaaggttgtcactttttgattcttcatgctccttcattttagtaaattattcacataatttagatcaacatttaacccatcttcactaaattcatcaaaatgttcatcagattcttctatgtcatcataattattgcgattcttatcgttaatctcattttgcagtaacgatccatcgtccgacaaagttaatgattcaaatttagaattttgaaatatatttccacgttgatataatgattccgacaaatcattgtacttcattactttcttgactatgcgtggattgagtaactttcttcttgttggtctttgtcgtctgatatctcaaaaattcatgtatattgggtattctctctctatatcgtagtatattcagtctataagactgtcgtacccctccagcaagatggttcatcaatgtattatctataactatatgtatattttatgattaatttttacaaattacttgtttccaaagagaaaacctttttcacgaaacattgattgacatgtaactaaaattgaactatataaatttcgaatactcaaatgaaaaaaaaaaataggttaagatatagaagttttactctttttaaggctatataaaagcattaaacaaaaggtcaactatttacagatcattgtaaaggttcagtagatccactaagacggttcaaatgaagataaacatcagtaccatagccttccatactgattaattttaaatcacctgaaaaatatctagcgtataatcttgaatgtggtaaaccaacaccaagacccatgaaaggaactttatgattattaaggtcaaatagttcttcctcttctttaatttgcttttctgcagatgtatagaaataggtccaaattaaagaaactgcagatcttggaattccaccaccttcatcagatattttaattgtaatatcttcgtcacctttggcaacaataattttaattggtggatatttgatatcatcaaggtcgacacctggatttaacttactgtgatgttcaatggtagctcttaaactgtttttcaatgtttcatatagcatatgaactaaatgccctggaacgtatctgaatgataaatcagatggacaataaagtttcacttttggaacatccataatattgaaatgttcttcacatgcaaatctagctgcatcaatggcatcatggataatttcctttatattacaatgtaaacaaataattccaacataatcatcattttgcatatttttatcagactgttggttgattgcaattgtttgtccaattaacattctaattccaattctgctcatatagaatctatccaaaaattgattaattggtgaattcaaatatttataattatttttttgtttccaattttgaacaccccttgctaatgttgtgacagttgcatcatgtcttcttttaattttgactaacgttttagtaaccaacttattataatcaattacttcttttgggtatataatatcatttggagcatcttgaaaatatgttgttaatccaataggcttagcaaaactatcatcaatatttcgattttcaccttcaatattaaaattaatatcattatcaaacgttgaattaatatttatatcattattggttaatttaccctttaattgatgattgtttttcgttttatgttcgtgtttaatttcattttctatgtccattttccttactttcctttttaaatttttaccaataactatcccatcatcttcaaatataaaattacttgtcctacgacctaattcagtataattttcgttattattattccaatttcccatcattaaattcatccttcaaatcaataaatccatcagtactccaaattaaatcatccttttgatttttcaatagcatatctctcattttatcttctagtacaggttcttcaagattcattaattcttcaaaactttgtgcataccaatcacgtactaatttaatcgaagtttcatcacttaaacccattggtaagttttccaattctctgaccctatgactcaacctaattggtaattcatgtacatgcaaaatatgaagcatgaaataatgtaccctgtgacggtcttggcccaaattgaaccatttgtcgtagtgaaacaccagtttgtggcagttttgcatatttatatatctgatgccttaaggcttcactcattctccatccggacatacttgctaaaatatcaattgatttgagttacaaagtaatttaacgaaaaggatcatcatcttgtcaatgaaatttttacttaacggactcattatgacacaatcacaccccacgaaaaagtagattaaatttctcggaggaacggaccttgttgtatgcatttagttgatattatcaaagaaaagttgacatttatttcaatttagagagtattatacaaaagtggcctacaaaaaaaatcatctaccaacacctgttactgcagtaagaacagccccattcacatcattaaatagttcctccactctttcacgaccataattgatattttcattgattaaattagtgaaacgatctttaccaagcataaaagatccaacaatttcacggattttcgaaagaataacagtcatgaaattggaaattatccaacgtgattatattcaaattattaccaacaacaatcaatgacaataataacatacatggtaaccagaagaataaaagttttgtatctgaattaattgatgtacgtaaattatctgcaattatatcaacatcactgtctttgaaactagaatgaagttcttcattaattatctcactatttttagttatttggtgttgttggtgttgcttcttaatactatcatcaccatgtcctctgaaattgatcaatgatcttaatgaggatccatcagggaataaatcatcatacgaaggtaatggttcatcatcagaattaccattttcatctccagatttattactaacaatattatcaccatttttcatcttctctttagtaatttgtttcttacattttttcttagaatctcgagaattatcaatttcgttaattctattcttaattgcttctttcattgcaatccataaattataaccaaatgaattagtatctctatcatttttaacagtatcttgttgtaaatcaatactatcatccaaactatcatcttcattatcggcttctgaatcattatcatccctttcaagaattacatggtgtttaaccttattatttttgaatttacgtttagtagatgatttataataatcaccgatttgaacttcatcgaattcctcaacttcagaactgtcaatattatcattaatatcaatttccccttcttcataatcatcatcatcatcatcaaattccatatctgttgatgtatcggataatcttctcttagcattgattaaatctaaaacattcgaatcagctatatcacttaataaaataccattatccaatttagttgaaatattagccttgaatttaatcaaaatattaataatctttctattacctttaataaatgccaaacttaatggtgtaaaaccattcttatccttataatcaactcttgaaccattcataattaaaaattcagttaatttagaataattctttaaacatgctaaatgtaacattgtttgaccttctaaattacaaattgcccaattaggacttgaaatcaaagaatttggtattctgatcatatttaaaaatctaatcaaaatttcttcatggttaagtgaagttttggataattctttaattttatttgacgcaactgccatccaatttagttgtaattgttgatggatttgggttaaattatcagttgattggatttgcgtttgatttggtgaatttgattgattttcttgattattaccaacaattctctttgcaatatttttggcatcctctaatttaccattcatctttaatccaacaatttgtaaagccaattcaatcaattgtctatcactatcatcagtatatgtaaagatttgatgaggagcattagaatttgtaaaatcataatctggaccatcaaatgtaactaatacaggtccagcctgtgaagcaggtggtaaatatgtaacaatagttgaatcagaccaacattgtgtagctaatgccacattactaccaaatttaacattcatacctggtttgaaattagatccctaataatgtaatttcaataccacctctaattggaccttgtgcaggaataattcttctgacgacaggtacctctggtgtatcaacatccatattcaaattaagatctatacctaaagctctgttgatatcatcattcaaatctgtatctatttcactgactaaattgttagaactacttaaactgttattatttttatgagtatttgatgcaccaaatatttcagcacctgataaactcgatatttgattatcatagattttagtttgctcaggagttgcaggagaatacgcttgttgctgaagaaataaaattattattaggagataccgcatctgaagttaatggtgaaacagcttcttttttaattgatattttggattcaccatttgtatcaacattactactactattattcaattgatcatttataattttcatcgatgttgattgcggttgagagtgcgtttcattatttaaactttcaaagaagcttgtggattcaaattgagaccaaggtcttttttgtcttttagtttgtcgactggattcatcacctaagatatttgaaggatcaaactgaaaatattgaagaaaacatacctgtcttatttttaggttttaacggaagtatttgatggatttgtatttatatttggaattgagtttagatttgtatttgtattaatgttcatattcgtgttcatattggtatccataattatatttgtgttattaatattggaagatatttgcggtattgttttctttgaatttttagataataaatctgtagcaataactgtagtcgaagtagctgtagttgctacactcatatcacttgaagagtcattcattgaagtaattgaatttttatatgccattttggtatctttatttttatttgagaaatcattcgaattagttgttgaagatttgagagactttttcctatccattattaaaataggggttgaacaaactttaccaacaattttattattttgatcttttaaaaatattaagattttaaaaccattagcttcttgatgatgtcttgaataacaaacaattcttgataataattctaaatgacgttcatttgaattaccatttgggggaggaaatgaaaacaatttctttactatttattaatattagctctctttggtaatgttacatcccaatttgatgaatcatctagtaatccagctttcctacgagaagctcttttcaattctcttctcatacaacgtttacaaacattgcaggatttgactttattatcattttgttttgaaagttgattagtttcagatcctataacaaataaatccatatataataagtgttgtttaatagattcaggtatactattatcagccagtgtaaatttaggtttagttattgcatctcttggaatatgaatcaaaaattgtggaggtggagggagaaactgatatttctaactttatttgagtttcaactcttgaatttggacataaatcttttaatgataatttataagggaaggagtcatcgatttgaaaaaagcatcttgatattcttgtggtaatatagttgttgtaacatcagtatcttctggattagttgttgtttgtgcttttgtgtagggaaaattaccaacattagaatgatgaatatattttgaatcagcatttaaaccaaattgtattttcaaaagttcatcctttgattcttcaaataatttaagttcttttgtaggtgagatggttggagtctcaagtactgtcattgattccattggagattccatatctatatccatttttaagcctttatcatcatttgaagaaatattttcttttttaatagtagtataatcattattaattattaatgttatgacttagcattattaatggtattatcattattgttttcagttgtttatattattaatgttattattttcatcattattattagttttcttagcatttgtagcagtattatcaataaaatctagtatttctccagtttaaacattgagggtctagaaactcatccaatacttcatcattaaatgaagataggggggagttttcacgtttgaacaggataagaccctgatgagataaaagtcataagggtatccatggtatataagttgatgtatagtgtaagagagagtagaacaaatagatccaaacaggagtaaatattcaagccaagtcttaaactcttgttcttattcttgttctcgttcttattattaggtcaaagtcaaaaaattcaacaaaacgccatcgagcgacccataattttttcaaatttttctcactttttttttaccttatgtcaccttcctattggggaagtatttcattaccactttacataatttacaattaattaacttatttatacactttattaactattaaacatcaacatccacatctcccggatcaaccacttcatctctatctcttgatgatgacgacacccttcgtttaaatctcattccttttcttgttccccttttctttccactattttgatctatatctcttcctctacttctatccctactttcatctctacttccatctcgattatctgactttagtcttttttcaaatctatcatacctttcatcagttttacgtgatctcgatatctcaatatgaatccccctttcatatccacaaatatcggcattacctaattttttaccttctttataatcttttaaaactgttaacatatcctcctcctttcgaaattcaacaaatgcatatggtcccgatctgttggggaataggtgaactttctctaattgaccatattcttcaaatactaacccaatatcacgcgcactaacatgatcatagaatttagaaacgtgaagtgttctgattgttgtagatgacgaaggtgatcgtattaatgaggaagacgatattggtgatggtattggagatgccaatgacgtaactgttgagtctataggaggaggaggaggaggaggaggaggaggaggtggtggtggttgtagtaattctgaatccatgtcaattgtgattttttatttatagtttatctctatttagtaattgtatcttcacttgaatttattataggaaatacctttcttaattttcaattttccaattacaccaatgttataattatagtatcagttattcaagaaaatggagttccaaacaatagcccgcaatgcatcattaagatagtaacatataataatgatcttataagagaataacgtaattattttcccgaatgtggtctcagccgcgtcgtagttgaacttaagctttttaaccaacattttgtatgcatgctctaagggccccacttaaccacacgtatgtatcttgttgagctagtcatcaagacagtgataaggttttggaattatcaaacttaagaagtgaattatcataatcattatcaatttccttatggtacatgagaagaggtaatgccttatttatcaaaatgtcattacgtaacaacatttaagtatatccctaatgaaaaatttatcttatatagtcttcaaataagtataacatgaaaaaaaaaatattttttttaaatttcaatcattaaattatcattaaagttcattaaaatttcaatctccaataaacaataccaaaatgccaaacgaaatacaatttagagtaattgttggatcttatgaacattcattactatgtttatctgcaagaattccacttattgaaaatgataaagacattagaaaacctcatttccaaacaattttccattttcaagcacattcattatcaatcagatcaatcgatattgctaaacgatatcttgtaactggttcaaatgatgaacatatcagaatttatgatttacaaaaaagaaaagaattaggtactttattacaacatcaaggttcaattactaaattattattttcaaatgaattattaaatgataataataagaaagaagaagataatgaagaaaatatttcaaaagatgaaacaattactatatccatcacataaaagtggtaaatggttattatcaggttctgaagatggtaatataattatatggagaactaaagattgggaaaaatttggtgttttaaaaggtcataaaggtgcagttaatgatatttcaattcatcccaaccggtagagttgcaatttcagttggtgttagatcaaactgttagattatggaatttaatgactgctaaaaaggcaagcagtttaaaactaagaggtacttatacaagaggtcaagaaggcaacatttgttaatatttaatttatcaggtgatttctttgttgttggatttagagatagattaatgttttggaatacaagagaagctaaattaataaatttattaggtacaaataaattaacaattatggatattcaatttgttaaattagatgatgataatgaatatttaattattgcttttagtaatggttcaattaatttatataatttcaatttatcattatttgagatagatgatgttaaaaacattgatggtggtaatttagttaatataagggaacctgattttaaattattaggtcattcatcaagagttaagggtatttcaatttatcaagaaattaatgatggtaaacaatttaatttcatgacatcaatttcatctgatggtcaaatagttatttggaatttagatactaaaataatggatcaacgttgcagtttatacaactggtgaaagattaaatgttgttacaacaattcaagaatctgttgaaaaggcagatacaatgaaaccaatttataatcctgaacttgatgataaattaaatgatattgcaactgatagtgaatatgagagtgatggtgaaagtttatctcatataatgaaaggccgtaaaaagaaattatcaaagaagaaacaaaagcaagaaagaaagaaacttttaaaagttgaaattgaatcttagtatgtacattttatttctacatttgtaatttttttttttcgaattattactatattaaaaaggatattatataaagaatgttaaatcaattaaattagtttagtttatttaattagtaaaaagaatattagaattttggtttgtttaatcttgcgacatgatgtttgtaaagatcttctgccttcttccatacaggtgcagttgccttgtttggtaattgctttaatgaaggtaataaatctctagcgaaaaattcagaagattctcttggtaataatgaaggtaaatgatcaattgaaataactgataattttggacctttagttgtttcaactaaaacagttggatcatcaaattgagttgcaattgtatagacaggaactggattatgaggattagttgtatcagctgagacatcaacaatagttcttaattttctattttcattatttaataaatcataattaataaatggtggaattggttttgataaataaatacaattgatgaaaatatcagaatctgcaatttcttggaatggaccaccctttttagtttcattcatatcccattttaataaattagattctggaataccaacttttgtacaaaggtcaattgcagcctgaaccacatctacctaatgcaccaataattaaaacagttggatatttaccagtttttttgtgagcttttgataattcagttttgacatgattaattaataaatcttcatttggataaggtgaaacacctggtaaatttttagaatctgaatttaattgtttaaatgaccaatctaaaacacctaaagctgcacctgcaaaacctgcataataaccaaatgctgcaactcttctaccttgatcattttctaaaaactctaaatcatataatgtaccaccaccatatgggaatcttgataaaacatcttcccaaccagcttgatttttataacaatgagcaaattgaatatgatcatgaattaatgggaaagtttcttcaggtaattcttttaatccataaataattctattctttggagcagttttccatgattcgaatggaacgatttttgcaccaactttagcatattcttctgttttaaaagtagattgtggagcttcttcaacataaatttcaaaattacctgtatctaataattctttaacagtttttggagtaagagcagctcttgcttctcttggtttagtttcagctcttaagtgaaggataactttgtttccagccatagttgtgttttgatgttttgattagatagactaagctaagaagtgagtaaatgaaaaaagaaagaagaaattatatacaaaagaagtggcaaatgaaaaactaaataccaaaataaaaaaatatctccaaaatattcacttatcttctgaaattgactcttaagtactgtgattcatcgaaattaaaacaataatgactgattcttcaaaaaattggtaaaaaagagcgcctacacagaattacccttttggggatacaatgctgggtttcggaaatttagggagagtttttaagattttggggtaaataaatgtctcaaatttgcgaaatttgctgagagttgaaatctcatgaaattttggaaattttggaaattttcaaaattgatttatattccccaattaggaaggtgccttgtcttaaattatcattctgctcatccactttggtttattattcctcaaatattgatacaaaactcactgaatatgcccaatgatagtccctaataactcctatgctcacattttcacctctcttaacaactaaaagagtacgagaccattttcaaacacctccaaatccctttaaagacacgccaaaagatttaaatatttcaaataataatcacaaccaaaacactggtaatacattactattacctaactcatatatccatcagtcgtctcctcaaaactcaaaacttgttaatcttattatttctgaatcgatacctgatagtaattcaacaattatacatgataatgaatccaatactaccaaacaagaaattaatagtaattctaataatataaggaccaatatgaccgccgatgttactggacttcctgatatgagtaatatacatgaaaatagtacaacatctaataatattaacccaattaccaataataatggtaataataataataataacaacaacaacaacaataataacaacaataataataataaccttaacaacaataataatagcaacaccaataataacaataacaatacatctcataataacctcgaatcttcaacaattgtcgatgctaatcaacctttaactcaagctgataaattaagattgtggagacatgatgcattgcttcaacatcattataagactgcagtttatattggtgataaaatcttgtcattaactaatgatccaaatgatgctttttggctagcacaagttcattacgctgcaaataattatcaattagcaagaaatttacttactggtcctaaatttgaagcttctgtaggatgtagatatcttgcaggattatgtctttacaaattggataaaatggatgaagcattagatattattggtgaagtaaatccatttaagaaggatcactcaattagaaatccagatgggggaatcaaacttgaagcttcaatgtgctatcttagaggtttagtttatacaaaacaaaataattttgataaggctaaatattgttttaaagaagctgtactggttgatgcaaaatgttttgaagcttttgatgagctgatatctaatcatttgttaactcctgatgaagaatgggatcttttagaaaatataaactttgatgatgctgataataataacgaattggttaaacttttatacactacacatattaataaatataaaaagttgaatttatatgaagatgccaaacaaagactaattgatgaatttgatttgggtgataatattgatattttgttaagtcaagcagaattattgtttgttaagtgtaaatttcaagattgtttagatttatgtgctaaaatcatcgatcgtgatgaattaaatctctctgcgttatctaattatttaagttgcttgtatgaattaggtggtaaaaataaattatttctgatggctcataaactagctgaaaattatccaaatcattatattacatgggttgctattggtatttactatttttcaataaagcaaataacagaggcaagagtttttttttcaaaagcttcaatgatgaacccaaattttgcttcagcttggattggatttgctcatacttttgctgctgatggtgaacacgaacaagcagttagtgcttatgccactgcttcaagattattccctggtactcatttacccaatttgttccttggtatgcaatatttacaaatgaataatttcaccttagcctgggaatacttgagctattcatattcaatttgtccaactgatcctctacttttgaatgaaataggggttttaaattatcataaaaatgaattacagagagctgaagtctatctacgtcaagctttaatatcatcgaaatcattagaatatggatcaaaagcttggtgttcaattcattgtaatttagctcatgtttatagaagaatgaacatgtttgaaaaagctgtcaatcatttcaatgaagttttaaaaatagctaaaaatgatgtgaatatttattcaacattaggtttaataaatttaaagcaaggtaaaattgcaaacgccattgaatatttgcatacagcactctctatccaacccaatgatgcaatggctaccgatcttttagataaggctttggatttgaatgctagaattgcaaataagaagtttttagatgaagcaatgaaaagtacagctataaacaacttcaaaagaggtcatagtaaggtcacagaagttttaaagtcatcaatgagtaaaagaaaaatatctgaaaacctttcaaataatctaagtgatgagttgaatggatatagaaagcgattagttttattattatcattatcattatgattaaataaattatataatatttgaattcaattcaattcccttgagcgtaaaatttctagctgaaatatggctttgtttgcctctttctacaaaatctaaactttttgatgattcagccaatgatttaagaagtatcatgaaaccccattttcattaagattttgcatctaattaaaggaagattcagatcaccatctatatttccttccatcattgacgtaaggaatatcatttttcaaatcaggtgaatttaataagtttattatgatccatgcaatacttgttttgatttcccaaaactcatcatttagtatataaggcgtcttaggtgagtttaataaatataataaatgttttaaaatattcctttttacagataagtgctttaataaatgttgcagatgtagataaatgtatcaggttgtatagtaatgtaattgttaatgtatttgatttagattctttaaggaaatctccaacgaaatcaacaaagctttgtccagaagaaaatctttcaaatgctttatttattttaacagtatctgatatggaagtagtaagtagatttctaaagacattaaaagtttcaatctgtatatcgacgttctctgatgcagctaatgaaaataagcgatctaatgtcactatttccaaacatttagatttgaaatacatatcatcaccaaataatgcatttctaagtaatgccaatgatgcaatgacaatctcatcacattctctatcatccaaatattttttaataagcaacaatatttcatgaactttaaaataatctctagttgatgagaattcaatgatcaagttagatattataccaagtatcagaatatgaagtgattttttagcattatagaaaccaatattatttaaattattatcaatagaatgaccagcttttaaaattttcaataatgcattactgagagtgtctgttgtaaagtatattcttaaaagaggtgcagatctagataatgatttcaaaaatgagcatgccgcaaacgtcagtctattagatgtttcaagtactctcaaatataatgagcttgacaagtttggctttgaaataattaatacatgttcctctagtattttcttcactaaaacatcacttgtaccatttgcaattactgatttacattcatcattgattactgccatgtaacttaaacatgttaaatacattgcaaaattataggcctgtcgcatactcattgcattatgacattttgaagattctaaatccatgcaagtttcaattgttttctcaaaatgtatgtcatacaacatttctgcaaattttgaattgatactcaataattgaacaatcaatgagatgggtggtaaatcaaatggtactttaaaatcttttaaaatcatttgatttcgatgacgactttctttcggtacataatctaatcgaaatactcgtaacacaacaagaaagattttcttaacaaatatctgtgaactaaattttgtaccattgaaagcagcaagtttgacaaaaactgaagaagcggcgcatactacatcaaaatcagaaacttgtagtaagctaagaataaacttctcagcagtaatatcaaaataaataccaatgtcattgtcaggattagagaacatacgtgcaagaataaataagtaatgtgataaatgttttgaaacttctttgactttataatcaaaattaacaggaaatgtggaatgaattatctttgccctaggtatcaagtattctttgatgaatattcccaaatatcagtatagtttagatgcaaaatttctaataattgtttgacgttactttcatcataatagcaaggatccaactaataacaaaaaagtttccagaagatcttacggatatgaggaggtgtattcaaatcagcagttaaactctaataaaattttgaataaatgcttcgatgttttccactttattaaaatgtaacgtatttatgtcattattattgcaatattttatgatatgaaaacaacacaatgctaaagtatcaccatgtattgccaataatgttatttcgataatattatccatagtaagtatttaattcttcatttgtgcatttgatagggtattttgaagttatctaagaaatatatcgtatttgacgctcttatctctggttctgtttcatttgttaggaagagttattatttcattatacaatttggtcaactcattaaaatctcgtgttttattcaattccttacaaagtgcttcaaactctattgaatggtgtatcatattcagtggattatcctttacaaaagagactttactttaataatagaaattaaaaataaagaaccgggatcttttattttatctcctccttctaattgtaatgaagcaccgcactgcaaaatctttgatgcgaagtcatcctgatgattatgtcaggtctgtaggtggttagtttgtatatacgaagtgttagaaggatgggtatatgtgtttttacactgtcttttgcatattttcatacgagggagaaataaaaacatgttttatacataaaacaaactatcatacattaatgatgttattcaaatctattttttgtttttgtgaattcctcttagctcttttcaattctgtcttgtttcattgtgattgggtcttgataaacacccggatatcgatgtttataatactgaaaattgagttcatgaagtatatcccagatagatagctagaaactctacaatactgattgcatgaacatataatttttcaaactgattgaagaactctcacaaaaaaaatatttctccatgctgctgaaaagttcggccttaaatgttgaatttttgatatctacattcttttgcaaacatagaaaaccagacatgcctagggatcccttgattggtatagttgggaaaccatccagtggtaaatccacaactcttaactctcttacagacgcaaatgcgaaaatgggatctttcccattcacaactattgaaccaaatagagcaacaggttacttaaaaattgattgtgcatgtgcctagatatggtaaacaagatttatgtaaaccaaactatggttggtgtgaaaatggtaaaagacatgttcctattgatttattagacgtcgcaggtttgattcctggtgcttctcaaggtttaggtttaggtaataaattcttggatgatttaagacatgctgatgcattaattcatgttgttgatgtgtcaggaacaactaatgcagaaggtaaagctacaagaggttacgatccattgaaagatatcgaatggttacaagatgaaattagattatggattgaaaataacttaaataaaagatggggttcaattgttagacgacatacatctacaaaatcaagtatcgttgatactttaagagcacaattcggtggttatggtgctaatttgagtttggttaaagaagcagttgattctatcgaaggtttaccacctttagaagaatggacatcctgaatggataacaactgttgtgaaagcatttatgagatttaaattcccaacagttttggcattaaacaaaattgatcaccctgatgctgataaaaatgtctctaaaattttactcaagcatccagatactagagctgtcgttacaagtgctataacagaaatattcctaagaaaacttaaaaagcaacattatatccaatatgaagaaggaactgaatttgttgacacattagaagatttacctgattctgatttgaaaccattggatgaaaaattacaagaaaaaattgaaaacattagagatttaggttttatatagatttggttcaacaggtgtcgttcaagttttacaagaagctgctaatgttttaggatttaattccaatttttactgttagaaatattcaattcatttacatggtaacagtggatcaaacgttttcagagattgtatgttatttaaaagaggtactaaagttggtgcagtcgcaagaagtataatgggagaggttacaattgctgttatagaaggtgttggaggtaagaggaatttcccctgatgatacaattgataatggtaaaaatgatatattgacatttaaagttgcaccaggaggggttgttaacaatgaataaacgaacattttttttaatagaacgccaatacgtatagagagtaaataattttataattaagaaaaataagatagaagaaacgaaaagaaataatttattaaaatgaaaatactaatcaaaagtaattctaaaaaagagaaacgcctaagcttataaatgtatttaaatgtaaaaatgaaagcaaatatgattataatttatatctgaaattaacattttctttatcagttaaatctgcaaattcgatattatcaatatgaggtaattctaatttaccttcagcttgaagttgatctcttctcttattttcagcccaataattgtagtataaccaaaggttaagtacaacagaaacctgcataacagacaaccattgaaatttgaccacctctatattctggtgcttgttttgcaatgaaagtttgtggaccaactaagttaccaacacaataaccaattaaatataatgcattaactgtaatcttcttagtatgaccagcaacatttgaagtaaagcaggataaacaacaaatcataccaacaggtgagatatagaataaatagtaacctgcaagtctagcatttggagaatcaagtgcaaatgctagcatacaaacagcaactaaagtaagtatcattgaaccagctgaaatggctaatttatgtttgaaatacttttgtaaataagcaaataaaatacaaccaacaagttcaactgcacctcctggcatgttcattaacaaactctttgttggtgaataaccaaaagtttcagataataaaataggaaccaaaattagtcaatgcaccagtttggaatatcatgttgcaacttgcaaagaagaaataaatccatgtattaacatctaataatgcttcctttaattgatgaatttgaaaatgtctagttaccgaaaccttgttgatttgatttaattctaacaacaacttgtttcttttcagtttcagttaagaaccatgctttaacaggtaaatctggaatatggaagaaaatcattataccaacagagatagtcatacaaccaataacaatgaataaaactttccatgcatccattgaataagaaccttgactgaattgctaaaccatatgcaattgatgaacctaaaattgtaccaaaaccattacaagcaaaccaataagcagttcttaagaattgttcatcagctttataccattgaccagtaataataaccattgctggagtaactgcagattcaaaaatacctaataaagttcttaaagtaatgaaacctgcgtaattagcaggagttgcatgtaaacataaaatagtaccccataaaacaatgaaaatgcctgacattttagcaactgggaatctttgtaatgccatactaattggaattcaaaaattaaataacctaaatagaaagaagaaccagcccaaggaatattgatcaccatgcatgttgtaataagttcttaaacccataattgcagcataactggatgaaactttgtccatgaattgtaatgcatataataaacaaattaatggtaataagaaaatatcaatttttcttaataatttctttgcatctgcatcagttaattcgacgtcttctgtatccagagcatatttcattgcttcatcaacatcgccagttatatcgacaactctaccattaattgatgtaatttgtgataagatttgatgagtatcaatgttatcttttgaaaatgttgaatgtaattcaacattctcttcctttttctcaatatcagacatttttgttttgaacaaaaaaataaataaataaataaaagcttaaataatcttaaataaagcagataggaaaaaaaaaaaagaaaaagaaaattatcaatctttttatacaattgaaggaaaagggtgaatcaaatttcttatcagcgacctataaagttacacaatatagatatcaaaaaaatcaaaaaaaagtgattttaaacttttactatctaaaattgataagtgatcaccctatactagtagtaatcgtcagtttctgataaagtgtggcagggtattgataagggtaagctgccatatatttcccgataatatagtactaaacactttatttgggcggtagtttaaatattttacagaaggagttttcaattttattggcataatttgcggtatctcccagtttagggaaagaccgattgataaatttcttttttttaaatttactttagtatattgatatggtattattgtttttgaattgatagtttacgataagtgaaaactttaataaaatggtaagataatagctattgttaattatgcttgtttgattgtaaacccttttcctttaacactaagataaagattatgggggtaccttaaacggagaatatcagaaattctaatagtatgcatattgaaaagtgataaaatccgccagagaagtgacgtctgcggaacttccgaataaggcaagtcttgcctggaccctgaatagtttataattattcaaataacccgtagaaaaggatatttaaggtgtgacgttcatgtttatattatgatcaatttgtgcaataactctcaactatttaatgatagtcacatcatattattgaattacacagatttattttaaaacagtttgataacagtaattaaacctttttttttccaacaaacgaagtttaggtttatacctgattacataatactatctatactgtttactaatttgttactggaaaggagaaattgacttattcagaattcaccgaatgtcggacttttcataaccgggtgtgttggtaacatcaattattttataaatgtgattcgatttccttatgaatgttttaatcaatcaaaattaattgatacaatttcaccttctttcttttaacaaacaaaaaatggcaaaaagtcacacaccacgttgtattcttattagacatggacaaacagaatggtctaaaacaggtcaatatacatcaattacagatttatcacttacaccatatggtattaaagcaaatgaaaatgacaggttcaaaattaattggtccaacaaataataagctaattaatccaaatgatgttaaattaattattacatcaccacgtaaacgtgcaattgaaacaaaagatttattatttgagtcaatcaaagattctcaaaatataccaactaaaattgatgaaaatattagagaatgggaatatggtgattatgaaggtttattaacaaaagaaattattgatttaagagcttcaagaggattaccaaatgcagataaatggaatatttgggaatatggttgtgaaaatggtgaaactgcagatgaagttacaattagagttgataaaataatttcagaaattagagcaattcatgaaaaatatttgaaataataatgaaaattgtgatattttagttattgctcatggtcatattttaagatgttttgctgcaagatggattgatgttcccaattaataaaaaccctaaatttatgcttgatgcgggtggtgtttgtgttttaagttatcaacatcataatatcaactgaacctgcattatatttaacaggtgcatttacagcaccagttgaagaagaaggtgcagatatttagaaggagggtatgctatattattatttatttatcaactatataaaaattatttctttaaaacatttaacagttcgttctgttcaaatgataacacacgttgatgtgagtgtaactttcttgtcgggtattcacctgcagtgattgtgactcttctcaggtcatcatatttacgttggggcggtttggcaaagttggcaaattctgaaatacgtgtctttttcactttaagtttattatttagatgttgatttacattctgaattgttggtgaagggattttcacatcataattgttcaattgattttgtaattcatcaaatgtgttattgaaagaataattaaaattattatttggattataatcttcatcaatattgatactattatcaaaactattatcaacattggtattaattgttaaatcattaattaaatctatttttcgatttcagtatagatttaattctttgttcatttgtattttcataattactattaaattttttcaatgaaaatggtaatgacataactgatttatatgaagatgaaacaacatcttcaactttattggaaatatcagttgttgatgtctttttgattttactaaatagtggttgtaaaatattttgtgttattgtatttgtactatcaacagtttcattattattttcattattataataactatttgtatcatttgctgtaatattatgatttgagacgttttgaatatctattgaattatttgattcattaatatcgggtaataaattaaacgaaatagaatttgtggattttttatgatttaaaagattgatattattattactattattcagttctccacgtagtgaatcaaatgaaatatattgatgtaatttattattgttattgttattaatatttgtgtttgtatttaacgagtgatcaaaattttccttttctggaatagttggacttgataatctagatgttgaatatggtttagaatcatttaatgaactatttgatttcctccaaaatttagatgctgtgttattgaggttatcttttgttctttgaaaaaaatgcgatgctgaattatttgaagatgttgataatctatctgtatcattatcttggtctgaatccaacattatagagacattatttgaatcataatttttggtcatatttggagttaataaagggtttgattcaatatctactactggatgaatcataattgagagatattgttttatctttatttatattttggaaactcaataggaaaacacccatcatgactaaaactgaaccaaatataagtagtataaaagttccataagataattgactccattgttggaaaaaaatcaaactattagcaattgttgttatgttataaatgaaaaacactaatgggtataaaattgaagttgaaacatttttcaatcctttatttaataaaaacaattgacttatggctaatgtaagaaataatgatacaatgaaataagttgaaacattatttaatgaagataaatcattatttatgaaagtatgaactaatatttcaattgttgatttagctaataaaagtgaaaaagctgataatatacctgatataataccaaaaatgattccctttatttgtaataagatatcagttgggtgattaaatagaaaagaataatacctatttgattgtatgttcatttgatttcgtattttcaaatcaatggtaaataaataagttgatagtaaagatataattaaaattaataaaccaatccagtgaataaaatttttatttgaacataatattaaaaactcattcaaatcataatttggttcagataatgaataagcacaataagtatttaaaaatgcacctattgaaattattattgttgcatataatgaattatcagtaaatggttcatttaatataagtgaatgaaatattgtattaaataataaaccaattgattgtaatggagataatattatcaaaggtaaagaagttatttgaattgaagatcctaatatattagcagttataaataaaaataaaccaaaatgccaaagtgaacgattataaattgaattatttgtgatattatcagttgaaaggtatgatttacgttgtaatataagaccaattgattgacaagctgacgatatgacagctgcaatacatcctagagctatatgtgatgttaatggcatattgtctctctctctacagctaaatctcaagacacaatggatatacttgttttatatagtaatttaagtttgtgaattatattcggtattattagatagtatatcacacatttttaacagccccctacatagacacatcgacgcgacacaacaaatgtcgtgcgtacgtaatccaccgacgcgtctactccattttataatacttttttaaaatttctaaaagtagacatttccgtaattccaccgaatatttataaattcactatgcgtcccggagatgaaagtcgggaccgtggccggggttataattatgtgatttatttatgtatgggatgtatatgaggtgtaattacatcaagggtttattagtgatgtagtatgtaaagatatactctataccatacaaaactgtctacacactaataaacacacagttatcagtgtatacaccattccactacatgttacaacagtaatcaacgataggacgtgtccgaaacggattgcctcgctctagtgggaaaaagaaaaaggacaaagcgcaggaagaactgggctctctctataaaacccgtccctcttcccccggggatgaggaaaatgttgacggcgggaatctttactggggtcttcccccgtaagttgtcaattgatttacccactatattctcaaattgtgaaaaaatattagcattttctctgggttttgatggtatttttttttctattattgtagctctcccaattattcccctttcttagtagtaaaaatactttacaatcttttaggtgattagattttctgtattacacaaacaagtttttatattcacatctacctgatataatgttctcctctttatacaagtcctcccttcgtcaagcttcaatgtcttcaagaactatggcaactcattcccttccaaagaaatatggtggtaaatatactgttactttaattccaggtgatggtattggtaaagaaattactgattcagttagaaaaattttcgatccatgaaaatgttccctgttgaatttgaaactattgaaatgtcaggtttagaaggtcatgaatcaaaaattgatgaagctgttttatccttaaagagaaataaaattggtttaaagggtattacttatactccaactgatcctttcattaaatctcttaatgttgctttcagaaaagaattagatatctatgcttcacttgttttcattaaaaatattccaggtgttccatcaaaattaaatgatattgatttcgttttagttagagaaaatactgaagcagaatattcaggtttagaacatcaatcagttccaggtgttgttgaatcattaaaaattattactaaatataagactgaaagaattgcaagattcgcttttgattttgcaaagagaaatgatagaaaattagttactgcaattcataaggcaaatattatgaaattaggtgatggtcttttcagaaatactattaaagaaattggtgcaactgaatacccagatttagaagttaaagatttaattgttgataatgcttctatgcaagctgtctcaaaaccacaacaattcgatgttatggttactccaaatatgtatggtgcaattctttcaaatattggtgctgcattagttggtggtccaggtttcgtacctggtgcttcatatggtagagaatatgctgttttcgaaccaggttgtagacatgttggtttagatatcaccggtcaaaatgttgctaacccaactgcaatgatcttatctgctgttaagatgttagaacatttaggtttacaagaacaagctgatagaattgctaatgcaactaaggaagtcttatcagaaggtaaaaccgtcactaaagatattggtggttccgcttcaacaactgaattcactgatgcaatcttatctaaattaaacttaaattagtttaatttaatttaaaactcatatataattataataagttatgtccatttatttatttatttatttatttcatattccaattaatacaatcttataaggtataaaccattacttgattcttcttttttatctttttttatacagtttttttaacatagaaaatctataaaaacaaagtgtcacgtcaacatctaaagctgctgataagcgacatgacgttaataataatttttttggaggctctgataacattgttaagttcatgtgcaactccttactcctttcatcaaaacatcccgagaaaatggcattgataaaagaccccgacttctatattacattgaaaaattcatcaatttaaaactccattagaaatactacgtaaaaactttaaaaatctacaaaaattaacagagaagaatcaagttcaaataactcattttttaaatgaaattcaaacaactaatgatacatacaaagaagaagcaattaattgatgaattgattaaagctcaagaatcttttcataagaagttattaagtagagttaagcaacataattcacatgttgataaattattatacagagttaagagaattgaacatattaacaaactacacgaaaactactccagttggtcatcggttgatattaataaaaataaattacctttggaattggtaaatttttatagagaggagaataatctcatgattgttgattatatattatggaacagtgttttaatttcaactaatcctgaattagtagataaactattgaatattaacaatggaagtcattacaatgatttaagtaaacttatagattttgatattatccaacaagcactaagaatcaaaaatgatatagcagttaaaaaagatttgaaattacttaaaatgtggtgtgttgaaaatcggagaaagttacaaattttaagggattcaccagataataatttagaaaatgatatagaatttgaatgtgattttcaacattttttgagtttaataaaggaaaaaaaatatgttgatgcaattgtatatgccaagacaaatttgaaagatcatgatgttctacataaattagagaaattatcaaaaggtttatcaataatttggtcaaattatgttcttcaacaatatgaagaagaaaaattagagagaaataatgaagaatcatactattatacatcagtaccaagtgatgcagaattaaacaatactgaaaaatttaaagagattaatatgttacaatcattattatctgataataaatgggttgagttatctgaatattttattatgaattttaaactaatttatggaattaaccaaatccaaccatttaaaacattcctaaatattggtggttcagtactcaaaacaagatcatgtaataatccatcgcataactatgataaatcagttttccaacaatttattggtacaaatatggttagttttgagaaattttacaataatattgaatgtcctgtttgttctgttgaattatctaatattttaaaaccattaccatattcattacaaacaaaatcaacattatttgatgatccgatacttttacatcaaaagtatgttcattcatttaaatcattatttatgtttaatagatcaatcttcctaccaattggtggggccgatgatcctgatagatgttttgatcttatagaaatctcaccaaagaatattcattttgaggatcataagcgttcaattgaagaagttgttgatccattaactggtacaaaacttttatttaaagattgtcagactgtttttcctacataaacttctcgactgatggaaatatttttttttattttatttttcactggataaatttttgctttaaaatcgtctataatatttttattgatagagtaacatatacgtttataaatggctagaggtaagggtagattatcagatgcattagttaaacaacaatcacaaacgaaacataatttttcgttaaaacgtaaaatggaaaaccgagatatacattattccaaagattcaaagaagaagaagtttgaaaagaaagaaattcctaaaaatgttgaagaactaccaccagttgatgaaagaaaagtttttataccgtttcaatataatgatagaattttaattattggagatggtgatttttcatatagtttgagtgttataaaattaaaccttataaaaagtgctaatttgattactacatcatttgattcttatgaggaattgattgaaaaatatggaaaagaattgattgataataatttgaatgaattaaaggaattgggtgttactaaaatttatcataatattgatggatgtaaattaagtgaaagtttaggtatctcagtggggaataaaagagttggtaacaaaagtggtaaaacaattgaaattttaggtggattaactgttaataatattatttttaatttcccccatgttggacagcatatcaaagatgttaatagaaatataatcaaaaatcaacagttagttgcaaattttatgaaaagttgtattgaattttactctattttgaaaaaacaaagagatgctactgggattgttgatgaaaaaaaagattttaataggtataataaagacgagtatgaagaatatggcgaagatgtaggagaaaatgaaactgatggtaattccactaaacctattttgaataataataatttaaatgatactgaggttataacaataaccttatttgaaggtgaaccttatgacttatggaagattaaaaagattgctaaagatagtattaaatactgtgttcaaagatctggagttctggaatggagattttataaggattaccatcatagacgtacggctggtcttggtgaaactaataaacaatcacaaactagacgtgcaagaatttacaaatttgaaaaatttcttcaaagtaattcaaagagtaaaaagaatagagttgttgatagcgatgatgaagagtaagataaattcagagatatactattaatatatagcttatgtgtaacctttttaaatgttaaatcaataaacatagacttagactttttataacatacgatcaagaccttctattttctaattttaatacactgtggatactttatttctcaatattccatttgattaataaaagtatacttattatcgacatataaataatattagttgagtaggtattattgtttaatacacgatctatttattacttgctaacgataaaccctatttgtttatctcgttctgtaagaataagagccacttgcggatattgattattgataaaaccttgatcaataaataccaatatattaatgctcctctgtcttactgaatcacatcatcaagttacgtactggtggctaaccagcagtaacttcacgttcaattatattagttgtattgacctcttatttacctgagcctccagcgcaccggagatatgaacctatcatacctctgatacctttcccggtatgttaactccggttaatagttttatcctagactatcgaccaccggagttactgtattgggtatggcccgaggtttaggttttaagttaattctagtatattctcataaatgacttcacggctgtaaatatacagcccctatcttatgaccacaattggtataatagggaaagaattatattattcattacattgttacagcaaataatacattatttccatggtggttccgatgaagaaccatatttgcgcttattgttacccatccaataacctaagacaaattaaactctaaaatccgcccaacgtaaaagtctaattgttccaagttggtattctcgcaaatcttaaaaaatacgattgttttttgtgcgacgaggaacttttcttgtacgggttaaaatcgggcttcccttttcagagcatgagattgtgattgatcatcatcatgcataactcattagggattgaaggatcacttattttctttctatatgggttttatctagtatgatttgtataaactcacgtgtagatattaatacagtcactctatagaatatttgacaacaatttagagtatagacttgctattcaacagtgacatgtcactcaactattgtaacttttgataataagctgtataattataatcttttttaagatatactctaaaatcatttcatttttggagtatttatttgtcaaaattgtttataaaaaacaccacacaaatttaaaagaattaatcataacaatactgtttacagtgatatagctataattgcttttctttttgattcttaaaataataaggtgacgagattgataatactatatatacttcatataaccctttaaacaaaggtagcctttaaatccgtttttacaaatacataaccgtatatccaagacactgaaaccatagggatattcgccggaaaggaaaaaaaattcgatatacaatggcagattctttacaagagcaatcaatagagaaatctcagtttagctcgccaaatgaaaaaaaaatgagaacaataataagtgaggatgagatgcatgaaaaaaaagggcttaataatgttcactcaatcttgatgaataacgatgatatggtaactaattctgatagtatgacatccaatggaacgcacaacttatcaatggcttcaactatgtcttccatagatgataaatcaacaaatcatatggaattctctcataagaagaaaaggtttagacgttcatataattgtggcccctgtaaacgtcataaaataaaatgtaatatgaaaaccccgtgtgggaattgtgaaaaatataatcgaatagatgaatgtctaaaagatccatcaaatccaccaacttttgagcaatcattagttaaacatcaaaggaagcagaagtatcttgagcggaaaaagaaacttcgccaagaaatagatgcacaacatatgaaccaaatagaattaaacaacaaggtacctaaaccaaaagctgttgatggtactattaataaagaatttgatatagaaaatgctaattctaatggatcatcaacatatcataaatcacccagttttatatcgccaactaacacaataacacaaagctctttatcaagatattcaactaggcaagatttgaaagatacaacccaatttatagaaacaacaacaaacatcaactcatcaacccctgatattagtactcctttcttaaagaataaaatgcaagatatatctgaaataaacacagcaacaaacaatgaacacataaataaaattcaaatggacataagtcagggagcaaataattcaaacccagactattttcaacaaccagatatgttcaacttgaggaaacaaataggtggataccaattttcataccttcatgacaatttttcgccaccacagtcatcaccaatacctaaacagcagcaccaagttgttccaccccctcatcatcaaattacaccacaacaaccaaatacattacacactaatatgatacatccaataattccggtgcattatgatcaacctttcatgtataataatacatataaccaaccacaataccagtcacaataccagccaatatatcaacaaaggtctataagtcagctatcacaacctaacaccatacatttaaatcataattctaattcttcatatggttatccttcagtccaaataaattcacaaataaattcacaaataaatccgcaatatcaatacatgatggtaccatcctccaaaccactgatgcaacaatcaagctctccgccaattatgcaaaataatttaccacaacaaagtcaaccacaacaagcgctaccaccattacatatgttaataaacaatgataatcaaaatgatcctaacacaacttatcctttaatttatgaaaaattaccaatgtatggctttgaaggagggaatattggaccaccaaatatgaaaatacagatgatgcaaccaccaaattcatttatcgatactgctggtcagaaaaattttgaatcggatagacttgataataatattagacccaattacagaattagtaatagtagttcgtctaatgttggtagtagttttgcagattcacaaaaatctaaaagctcaatgacaacttattcttcaattgatgaaactaaacaaaattaaaacaacatgcaaagtatgtatgataaaaagttaactagcaatatataggcttgcattatataataggtctaaaaacctgttgaaattcaaaataagtcattaaaaagatatatagagctagtatggattgaagtttttaaattacagaaaatacatgtataactttattttttctaacaactatttaacattaaatttaatccatcttataatttatcttaaacaattcatacaatgcgttattatctattggtgaatcgaatcattaattgtggtaggatcgatgatcaagattttgtgttctgtaataacgcgactttaaagtataatatcaagaaaaatgaaaataaaaatacaatccttcatcgtcatgacattcatttttagcaagtttcctttgtatacccacaataatatcaaacatgtcattctttaacaaaaatagattctctcgtagtaaagatcaagaaataaatacaaatcaaacttcaagaagctcaactccaattgaaaatatttccaaaaatagtttgtcaagtctaagaactgagcctacgtcaatctcaactacaacaacaccatcattatcacaaacgccattaattaaacgacaacaacaatcatctccaacaaatttacaaaaccaagttatcaaaccacaaaccaatgatcctaacgttttacgtgaagttgaaaatttaaggtcgtcctacagacaacagaatttttggaaatatcatattgtgaagatagcaccttttgaattttatatgacaaccaatccagataaaagacatagacttgtgcgtaatgcgcctagttattttataaaagttgaacttccaaatgatccgaaagtcaaaattaagggaagtcaagttgataaagggtatagattagtttttcaacaacaacaagttattggaattaatgggtttgatggaaattataaaccatttgtaattgaaaaactgccagctgataaaggtggtcattttaaaattttgtgtcaatataatgagtttcaacaagactggaatattcataataacatcaataattcaaataaaggacattctaaaaacttgaatttccaattctcaaatactgacaacaataaggatgatttatatgatactaataacaatcttttactattggatgattacacaatgggtgattttttacatgtttgttcaataaaagagaaaaagaaatcattattcattaaaaacaaaattgatggtattaaattagctaaggagaattcagtttactttttagataccggattttttaagaaagtgaaatggttcgatcccgtaattgctgttttcagaccatgtaatagaaatacaaaaaataagattgctaaatacgtgctgttgaactctaaaatggattcatctaatgggaatactaaaaaaatgtttagttccagcagacttactgttgatttttccaatatgaacattaataataaaaaagagggtgtctcagatgctaatgatgatgacgatgatgaagattacgataatgatgatgaggataatgatgaatatgaagatgggtcagataatgttattgatgaagattcttcatcctcttcaaatctttccaaattttacacagcaaaagatggattgtttagtcgacatccaaaagatgattcacctaatgattataaattaggttggttaacaatttatgaaaagggaagatattttgaaaaaatacctaatgggggtaactggcaaatggttgttggtatgacatttgcagtttcttttgaaaagcttatcgataagtatattaaagaaataaatgaacaatttgatgtataatttgtacacttaaaatttatttaccatgtgtatatttataaaatttaagaaaattatcgatatgcatgatgaatgataaaagaatttgatcccaaaatcatgtaaactttcgtgtgtatagataaaaccgaaatttcaacagagtttcaatatacacatgcatgcccatttcctctcctttcattgacgcatagacatggaatatcaaacactaatttgttattctacccaatctggaacttcagaagatttagcaaatgcattttcttctgagttgaataacctaacgaatgatcaaaatagtagtataagtcgaaatttaaatagtttttcaaccaatatcgatgaatttaaaaatgaaatttcaaattataaaatagttatatttttcattagttcatatggtgaaggagaaccatgtgatgattcagtaaagctttttgaatcattagaaaaatatgttagttctaaaaactccaagcttgatccactaataccatattactcaatatttggatgtggtaattcatactatgatcaatatcaggctgctgcattatgttttaaaaaaatgttagatttagatggtagtcaacaaattggtgactttgggtatggaaatgaagcaaagaatggtatatttgacgattacacagcgtggagttttgactactttaacgttttatcacaatttctagatgttaagtttaataaaattgaatcatacaatcctatgtattctgtcattggatataatgaaaataaaccagaaagaccaaccaatccaccttatcaagaacttaaaccatttattgcagatataaatatcgattctgtaaaaaagtatggagatgattacttagaatttgaagttaatctacacaaaaataaaagtcgtttgaaatatcaaacaggggatcatgttggtatatatccacaaaatgatgatgaaaatgtaaagaaagttcttaaaattttgaaacttgataaaaacattaaaaacggtgataaattaaaagttgttcctgttaacagaatggaatccaatagatggttagacttgacttttatttcatattatgatttgctacttaattctgtcgaaataaatggagtgcttaccagaacatttattaaaaacttaatcacatatttcatgaagaatgaaactgtgatagagcaattgaatcaagttatatcatccgctgaagttttcaaaactaacataaccgataaacgaattacactaataaagttatttgaaaaatatgaaatacaacaagatgactatgacaccataccgttatcattcataatggaaaactttggatatttaaaaccaagattgttttcaattaccacaagtgattctgttaattctgatagtgttggtgttatcatgaaacttgtcaaggaagaaaatagtggattctatggagtttgtagcaagtttcttgaaaacattatcacaggtaagattgaaaacagagtacctatatttattagaaaatccaaatttaaattaccaatgacactttctaagccattggtgtttattggttcaggtactggtattgcaccttttagaggatttttacaagatatatgttcacaatctcacaaattaaaacaagttgaaaagatagttatattctttggtcttaaagaattaaatgagaaatactggttatttgcacaagatattgaaaaatttcagaaaattcttggcaatgaaaaacttgaatttgttcacgtccaaagtagtatatcaagagagtatgtacaagatgtgatcaaaaaacctccattttgtgaaaatatatcgaattatctacatgaaaagcaagggaatatttttatctgtggagataaaagtggtatggcagctggtgtccgtcgtagtttagtttcgattctaggtaacgataatgtcaaagacggagacaaataccttagatacttacagagtatgggtcgtttcaaagaggatgtctggtagttgttatgattagtaatgtgtagatactgtttataaagccacaattaacatttcctacccgttatacggagaacaataagctttgggagttttcggacattattttttttttcttagcagtaaagagaaaaggctgggtaactaatttcataaccattatcctttcctgctgaaatttaatattccttttatcagtcatcttctctcattttacgtgttcaattgctttttcttcaacaaataaccaattagttatggactcttggactaacggatcagtatcatcagaatcattatcaagaaaatcatctgaatattcatttcatattgcaggacacgtcttctccgctattggataacgccatccgtaatattgatttaatattatcaaatcaaaccaaagcattgtcatttattacttcacaatatcgaaattcaacatggtcagttcaaaatatgaaaaattcattacgtatattaaacaattcactgaaatccggtggcaaaattgttatttccggtatgggaaaatcgtataaaattgcaagtaagactgttgcaacactgaattcgttaagaatgcattctgctttgttacatccatcagaggctttacatggtgatcttgggatgattagagaagatcatggagattcattgatcataatatctgcatcaggaaattctccagaattattacaaatgcttgaacatacaccaataaccgtccctgttgtattgatgacttgtaataaaaattccatattatctaaacatccaaaagtgatgtcattgttattggctgaaataccatcaagtttgtctgagacaaatctttatggtttaagtgcacctactatttctactacattatgtttaacattacttgatgcagtatgtatttcattaagtgagttacatattaatgactatacaactagaaaagaggtgtttagagtatatcatcctggtggagccattggtattgattacaaacttgagcaaattaagagtgataaacaagaaaacaccattgaaaaagaagatttaaaagatattaaccataatgaaaaggatataattgatggatcatgtgttgatccgaacggcaagggtagtgtttctagtgcaacaactactaattcagatgatgattgtttcgatattgaggaactcatccttatgaaaaaagttaaagacacgaaatataaatctataattgacaagtttcctgaaaatgagtctgattttcacaaacttgttatcctcaatgactatattatcatccaagataaagaaaatagttcacttttagattgtgaattagtgcgtattgtaattcgagactgtgaatcgaatgaagacgactggtcagaagccatttggaaaataaaggcacttgcacacccattcaatttagaagtgtgacaacttctatacttgatagaaacattttttttgtattaaaaaccctaaataacactttgtacttaattaaaacatgaactctactgacaatttccaaaaagagaatagtatttcccaaacgggtagctaaaggtgcgagttctggactttcctcatgttgaaactgaaaatataatttgaatatgacgacatccgtttacttgatatattttttccttcctgaacaacctctgcttacagttttttgtatataaaatatctatcagtaacgattaatatagtgaaccaatggcctcaatatttaaaaaggctaaagataggtcctcaagggacaaaatgagaacaacttccggaacttctattcattcttataacccaaataaccctcttaatgcaccaactgaagtagcacaggcaactcagtctcatattgctagaaatgctaatgagttatcattcaagaagggtgatttttttcatatctttaacaataataacaatgtttctcttgatggtactatcgaaatatttgatcctatacataatactaaaggtagagctcctgctagttgttttaagatatttgaaaaaactcatagatctggggaagttggagacaaaagactatcaagtaataattcaactacaaattcattttctaattcttctatacaacagggaaatagacaaagtggtcaaagacaagtttctacttcttcatatagttcagaaaaggagaaagctttaggtaacctatttggtgtggttttatatgattttaatgctgaaagatcagatgaattatcggttgtagcgggtgatattatattcatatgtgcacatcatgattatgaatggtatattgctaaatttctgaataaagttggtgaagttggtttggttcctgtctcttatgttcaattaattgatgctgtaactagaattccttttaaggaatcgcctagattgataattgaaaatgaaaatttacctacagttgatgaatggaaagctgttaaaaataaacataaagcaagtagtagagttgttggtatacatagtaatgaccaatatacaaacaatgatcatggaacattatcaagaaatggatcagctcgctcagggggaatagcatcaaaaccatttggtaaaagacctataccagttcaaacaaatattgaatattttacaagtactccaaatacaaataagttttggttcctagtcaaggttattatgtcagacggtcatgtcaggtatttatgtagattctatgaagatttcttcaatttccatcagaaattattatcatcatggcctcgtgaaggaggtaagtttgatacaaaggaaaagagagaaagaattttaccatttattccaggtcccatcattgatgtcactgagagtttatgccataaaagaatggtcgatttaaatgaatacttaataatactacttcaattacctgattatatctctaaatcaagtttagtgctttccttctttgatttattggatggtgatgaaacagctgctaatccaaatgaacatgtctctgtgaaaccaaatagggctgcaccaaatttaaaaataataaatactgacaatagacaatctcaacaaaataagttcaactctatgagttccacaaactcaactacacaacagtatactgaaaatccgtcacagtccaattatgatagaagatcgcaatatgatatcagaaatagttcttattccaataaatttagtgatttggctagaaaaagttcttcagcttcaagtttaacacaaagttttcaacaaatgaacatacaacatcagcctataccggatgcaagagagcaacatgagccatccaataatgatcaattattatataatcaaaataagacaacaaaatcttctacatctctgtctgtatcttcaaaaccatcatctggatcaaaattcaaacttaaattctattatttagatgacatttttgcaatagtggttccatcagatacgacgttatctaatttgaaatcattaatcacaccaaagataaatgaagcggatattccaggaattgaatctaaaattcaaatttactctaaaaattctattaatacagattatcaaaattacaatgaatctgaatgtatcagatcagataccgacctttggaatgatgaaaatttcacagataagggtaaattcttgataatcgtataattttaatttgtataatgttagtttgtattgtattcaatttgtttaatagacatgttttactagtatatattatttacataaatttagttgtacaaccagtcctctattctatacacattataattatttacagatttgtgttcaaaaaattgacatcattttttattcgatttgaatacagcttctctctttttagctttagcactgtatgctcttgtaacattttgaattggagtcgcatttacatctaactttacagttccatcttcattataaacgtcatggttaggatcgacgtctgcccttctatatacatttgttcctatgtccttgataaatttcatgtacaagtatattttatcagccattctatttattttattaatcgaataccttaaatcccaatttgtttgggtatttttttctaagatatcaagcggtggtgttgggtatcctgatgcattttcaccgttgaataaatgttcagcttgaatttcataagcaaaaaatccattttctaaactatcttttaatatgtgtctgtttaatgcatagtacttacttttaaattcagatgcatatttggtaaaaaacttaatcttgtcacttggcttttgtggatgtttttcatcttgtaaagctattgtataagatgtgctacgtgttagtttctcatcagataataattgggattctttcagtgtatttgcttccaatgtattaacgacagcaactatactgtactgaatttcatcctgatcatttgatttttcttcaattttttctgtttgttcaggtttttcatttacaacatcatcttgttcagttgtatcattttgaatttctactttactatttttataagtaacttcctcatctgtggtagtatcaacactcacttttcttctaatatcagatgttttcattctcttgaacaaaattctaaatggtttacctttagtatccttaacaatattatctaaaagtttctgcatgagattcatggaaaattccaactctcgatcggccataaatgtggataatgcttctctttttgtttggaaatgatttccaaagtcatctacaataatgtgaagcaattcttgattcgagacactgacatcatcaacttgctctatttctttgctgttttttgtttctttcaaagatttagcatcattattgttacgatcaaaggtacgttcaaactttctctttttgaataaagaagctctatacctttgattatcgatattatgttctccaaagaaataattatcaatttgagatagcggtaaatattggaaacctaaaaattttttaatattatgaaatgccataaaaataccatccatattacccaatctagcttgtaaactgtatttgaacataacaattcttgcagcatcaaataattctctttcaaaactttcaaataaacctgtgtttttatttatttcataattagttggaaaataatcggtatgttcaatgtcaaatctaatggcacaaacagctctggttttaatatcaaaagtaccagttcctggtaatcttgtatcaatagcatcaagttgagatctaactaagaactttccaattctagcataatgatatgcagatttatcttcttgaaccggtgcagtacttgatttcaaatatttctcaaactcttttggtgttttggtgagcattaactctaaagcattacctagtactgaaagtgttatttcagtatcatttacacggtctgcatcaactgaaaaaacactcgcatcatcattctttggggtaacaattactgatgttggtaaatcggaagtcattgagaagttagtataatctggatatatttttgaaaatgatgtagtgttgattggtctatttttactcaataatttatgaaacttaattaaaacgcttgtcatagaggaagttgatgagtagtatgatatgtcttgataatgagaatttttgttttcaaatgttttgtttagtttattaacttctgatgcaatttttaacaatttattatctctggatgatggtgtaaagttactaatcttatccattttaaaatcatcgatatgtggtattgttgtaagggattgatcaaaattacaaaaacgtgttcttggatcgcataaaaaatgtgagccaggagagaatagcgtagattgtaaattatgcttgagctgaggcaccataaagggcttatcattgtactttgccaaagaaatgtatttaggtaagttgtgtttgttgataaagccatcgtccaattttgtaaattgttcaatatcttcgctttctgtggtttcgttactgacagatttcaatttattcttcaaacttttcaacacatggttatttgattcaagttgtgattcagccgctgtctttattccattcaagttatggaaatttttcaagtgttgagagttcaccttagaaggatcaaaactttgatgcagcctcttatgtatacttaacatatatattaatgtgttttgacagtgaaatcaaatgcttttcttagtgtgcagctgaaattataggtaaatattatattaatgtgttttttcataatcttgaaaaaaatgttttcatcattagatgaaaaatttcccaaaacggaaaagctatttttttgcagaactccccggatagaacgcgcattattagaattcctttaaaatactatgtacggctcaattgcattttagtactgtaaagttctgcaaattttatgagcacataatcacctttcaccgtttgaaaaacgttttgttagtatttcagttttaaaaattatttattgttagttttaagactgtttacgtaagttttctgatgataattaggcgtacagaatcggtgttgatcaaaaaagagtcttcagaaaaatgtactggataatcgaagtttttaatgatatatataaaaagtagggattaaagagtggcattctaatataaagtagctttataattttataatttatacttgatctatcttttcttccatggtttcctcaacaggttcctcaacaggttcctcaacaggttcctcaacaggttcctcaacaggttcctcaacaggttcctcaacaggttcctcaacaggttcctcaacaggttcctcaacaggttcctcaacaggttcctcaacaggtgtttcttcatttgatgtttcttcattcaattgatttgtatgttcctacttcaatttcctcatctaattggttcacatcattatcatcatcatcctcttcgataattgcggaactgttttttgaaacgttagagatggtcgcagatacatcgtaatttgtttcaatctctttattttgatcagttttttcagcatcatttaaagtatctggtaaaatagtgaattcgttactgtcaagagtattttcacctttctcgttggttatgttatccgaaaaatcatgtatgctctttgaaacctcttctggaatttcttcggttatttctaatgtttgatctattggtttactcatatctaaacaccacatttctttactaacaaaagtcaatgtatttcccaacgtcacatcatttacttctacaactttcttgacttcacctggtaacttcctaccccttggaccccttgccctgcttcttcttacatcagcaactactagctccgcttttgtactttcacttgcttcgtgatcatttatctttttttcttccccatcatccacttttctaattccagttaatggattacctccaaacgccattccgggaagtgccataccaatcatgccattcaagttttgggcaaattgtgattggactctattgattttaggaacagttttttcaacctccttctcttcatcattttgtttcaagttaacttcgaaatgtctggttggtcttttgactggtagtttcggtttttgtttattttgcagtaatcccaagtctgccttttgttgttgctctagcatctcttgaaattgtgcaattcttgatgatggcttttttggtaccataggcgaaggctttttattgattatctgttcagttacttctgttttcaaaatattgcttggtcttttgtttggtacttgaggtaactgttgttcagagtttatctttggtgttccagctaggggatatctaagttggctgttgtttctacttctttttcttgttttgtttttaaatcagagtccatattcatcctaccagtgttattatttccaagttgatctggaatctcctcattacttgaatcttttgattttggttcaagtttggattcaacaaaatttacaatatcatctaaactatccctttttggtgtgtcagtttcttgttgtggtccggtttcaatgaattcttccttttctgtaacttctctattttgggtgaattcttctttttcggttgattcctctttcaaattttctgcgtcatttgttgaaaattgatctgtattattaatgaattcttgagattctaatgctacttctacttttgatttttgtgcatctttagtttcgatatccgtatcgtttgattcatatattttatcaaattcatctttctccataaatctttcagtttgagtttctttctctaaattattgatatcccctaaaatttcatctgcagtttcatcttcctgctcatttggttcaacaactaaatcaatttcatcaccgacgttttcgggtgcctctttaacttgaatggatgttttttccttttgagtaggaaatttttctgtagatatatggacttcgacaatttctttttcagtaagttcatgtggcttcaaatcatctctaaccacatctacatcttttatttcttcttcttcttcttcttcttcttcttcttcttcttcttcttcttcttcttcagatttagttgactcaactttttttgaaaatatttccgctgacttggatttaggtctgctggatgggacaactggcattggtttcctttcgttgcttagtgcttcatctagtgtagttactaccttgggtctagaagatggaatggaaggcggagtatctgctatagattcacagcttttctttgcgggtctatgtgaaggaattgatggttgatttcctttagtgatttcattagtataaatttcaccagtaactactttctttggtcgagatgccggtattttgggagttaagtccgaattgttgataggtctagtgtctgatgattctgaattatcagatcttgaatgtggtctctatgaaagtacgaaatatgagattgtttgttagtattagcatttttacattcaattgattatcgtgatacttacagttgaaggaattcttggggaatccattgtggttgtttgtttacgataaagttcaacatgaagtgaatctggaaattaaagatcaaatatcaaggaattccaaaaatcaaagcgaggagtgtctactaattaaatttaccgattagatttaaattattgttcaatgtgacagccatactaacaaacactaggtatacgtaatattatagtgagtttacattgtttgaaggctacagttcccaataaagaatgataaatggaaatattagctaaaagaggtgtatttgaacagaattgcctaaaatatacaataatgatttttaataaatctgaactctatataaattgatttaagcatagtttaatctaaagatatcgtttaaaacgtaataagagccgttatctggcattaagtggaaaacttgggagtatctttgagggttttgttcatcatcaattaataattcaccagtgaccatgactaaaacatcaccagcttcagaagcaggttgtgcatctaaagtggaaattctgtgttgaaccttttggaatggtaaagatgtaagtttttcaataatgtttcttgcaccttgcatttgagatgattcaaaggttaacattgagtgatctctctgtaaaaaaaataataaataacaattagaaattgtcaattaatatgttagtatttcagtttcatatgctgaaattggtagaaaagtacgggcatctcagttcatattctactcttttgaagatacatacgtaaaggttacctaaagatgatctatcttgatcaaattgtttgtagtaaaaatcacagaattgttgggataaggtattgaaatcgacagacattttctttaggttttttctttggtgaaattgagtaaattcaaattgatgcagaagctattcagtagatgtcaaagatcattaatatgcactgcaattttaattttaatgacatgaaggcatgcacaattctgcaggattctaaatctaaaaaatatttttacttcaaatttactatgtgcacgggtggacattctagcattttcgtcgcgtctagttaacaagttgacttcccaggtttaaaatagagaccaatgtttccttttatatacattatcacattatgcatgcatgtatgatagattgaccactttactggcatgtagaatagcatgtaaggattcacccttttttaaaaaatcaaaaaaaaaatatttttacctaaatattacaaagaaaataaataagaacgctaccaccataaatgtctaataaccttacctttgaaactgttatcaaccttctcttcatgtgtagcatagaattctgcttcgtgttcgtcaatttcagctaatccggaaaataaatcagcttcttcaggtttgataaatttggttctgaaagtaattttccaaaataagaaagtaccaactgcaatgaaaaacattaaataataatagaggaatgaattgatgtcaaatgtaggtataaaagcttgacaaccaagaaacgtgataattagccaagtagttaataatccaaatatagctggatagggttgtagttttgtagtccatgcttgtaatggcattgtgaatcgatcaacattttgtgatttacatgctctgtagaatcctaaataagtaatcatcatgaaaaagtagttaagaatttgaccaccagtacataagttaatcatccaatctaatgcaactgatgcggcatcacctaattgaagtaatgataaacatgaccaaccaacagctaacgcaatagcataaattggaacaccatttttcaaacagatactaaaacattttggagcaaaaccacgttttgataatgcgtataatgatctacttgaacaataaatataggaattacctgctgaaaatgatgcagtaatacataaaacattaacgatatctggtaatacggtaattcccatatttctcattgcaataacataaggtgaaacattggcacctgcagcaccttcggtaacagctttgactaaagttggatcattgtgttttaataaaataccaacagataaagcacctaagatataaaaaaacgcaagtctataaatgattgtcttaaaagctcttggcattgtctttctcggatctgcagcttcaccagctaccatacccaaatactctggcgcaacttcagtgaagactgctttcatatatgctgcccaaaatgcggaagctccactaccaagatattgaggaaatgcattttcaacacctttaaagttatggaagccaaaagcccaatgctgtggattaccaccaaccatggtgataaatgtgaaaaacattaaaccaacagctaatattaattttccaattgataagaaaaattctgattcaccataccatttaacagcaaatatatttaaaactaaatagataacgatttgcggaacaaaagcctctgcagcattataatcagttctccaaaaatgaatcattgcattaacagatgtaatttcaaagggtatataaagggatatcataatgtaaaaattcattccacaacaaaactcaaaagcaggatcaacaaatcgtcctgcatgtgtgataaatggagaatcaactggtaaataacaaatgagttcaccaatggttaaagtgacaacataaataataagaccttgaataaagaatgcaatcaaaagattaccacaaccaccattcatcaaaccataacctatagtaacaaataaaccggtaccaatagatccaccaattgctataagatcaatatgccttggtttaagtaaacgttgtgtaccttcacttttaaccaacgtaatggtagattcatcagatttcgatgatgaggataaattatttaaactgcttttttctttatgtattactttactatctgaatcatatggaacaaaatctggtgtttgtgaatctctctgtgcattatcatcaaaatcagattgtgatttatgaacaatattttttttcttttgttgacggttaaaaaatttcattcttttgtgcaatattctatattcaaaagatatcagcttgtttatatgaaaaatccaaaagaaactagtatgataaatgttagtagaataatatattcctaatacaacaaaaagtcatgtgaataagaaagtaaaattaacagggtaatgaaccggatttatggattaaaagcttgtacaaatcattttaattaattcaggctgtacaattatcttaaattgacatcacattgacttggtagattgtttgatccttttgttcgttgatttctgtttttctttctggattatagtgtacataatgattaatgacagcagctattttttgtcacggtggaaggtgtggggtaaacatgatcaatcaatcttcagaaagagggtccacttgatcgatcgagctgtcaacttgatgaaaataataagaaaaatcattgcgggatatccctatattatgtcatattaaggcattaacatgtttaatgacgtaactgttttgttctttttctgctaaaacatctcggaattattttaagtaactgattttcggagttgtaaatattctcgcttttatcactttaatagtgggggttataatgaataaaataaataatccctacttataatatgttttttagcgatttaagaaaattttctgaaaacctaagtcttcggtttccccctcaccaatatctcataattatcacatttgtagccgcgatttttctctatccaatcatgtacttagtttttgatttcagtaagtattgatggagttatgaacgtttttagtttgaaatttccgttttttaacaaagtcctgtaagatggtcatcaacattgagcacttcggacatggctcattgtaatctcctctcttggttgtaccggaaactttaccgttatattgtttacaaatagtgcaatattagaaaaaagcttaatgaagttagtgatatttttggtcctttttttgggcacctttttttgatttttagaaaattgggaatcaaatcttgaaatgtctctctgtaggaccacaataactttttttctctttccaatggtaccactggtttgtttgtagctgctctgtgggaatccagatattgccacacaatttcagctaaattactatgtaaaaacggtgttgagcctacaacaaaaagagtgtcgtgatttttggtgaaaaaagcactttttggtgagaaaattgacttaaattattacgtaagattataaaatataattataagtagggattttacattttccaacggtaaatggttgtctacacgccgaggaggattaataatatacactaaagtaaatataagaatgttaaaattaaaatttgtgtaaaagagaagagttgaaaagaaaactataaaatccaagatatcattctcgtccatctgctctccttctcatctttaccttgacgtttcttttcatagaactctaattcatgttgatcaatttcggctaatccggtaaataaatctgcttcctcagttttgaccattttagttttgaaaaccaacttgtacacaacgaaaataccgatatcaacaaaaaccattaagtaagagtataagaatgaatcaacatcaaatgatggtgatggtaagaatgcttggcaaccaaggaacataatgattatgaatgttgttatcaaaccaaaaattgtaggatatggttgtaactttgtagtccatgcttgtaatggcattgtaaatatgctggcattttgagctttccaaatacttcacatctacttcacatctacttcacatctacttcactatacccctcccccccccccctgcgatctacttcactacttcacaatttacaaactgttaatgtaagtgaataagtgataaaaaaaccgttgataaaagaaagaaaccacaaaattaccacaattacctttcataagtactgtaccaatagtaaccaataatgcagtaccaattgaaccaccatttgcaattaaattaacatgtccttcttttaattttcttttggtttcagcagctgcattaactttgaaaggattcatgaaagattggttttcttttatttgacgtttgaaacatttgtattattattaaaatcttcatcatctattgaggctgaatcaatttcagtaaccgctgaagttttaataaattagctttttctgagaataaaacattatttgatgaatagccaccattatcagtatcaaggaattcaattgtagatgcatttttccaaggttttgaaaaattgaaaaattccatgatttgttaagaaagcctatttctttgattaagaggataacgggtttttatgttatccaagggtggtatatactacttttgtatagggctttattgatcaattacaaatcaacattaataactatataaagattcaagttaacttgcccgtagataagatgtatacgataagaaaaaataagaaaagataagaaaacacacaaggggacaatctgatacattatttgaataacaatagatttacctcatgcatagtaaattacaataaaaagttttgggttcttttgggaatacccgactgtatataacatattttcgtgatgtttaagattgattgtacagattgacgtattgttatcaatttggaatcgatctgtgataagaggatattattgtctatttaggaaatgatagtgttaagaaaaatagaggggccgacgttgcgtcgacagcagacttaaagatgtaatagcaatgtgttggggttgctatgcatgttatgtagatgaagagtacatgtagtgtgtatagtatttctggtgttgtaaatacaggttcaaaccaatgaaaatctattgaattgaaccggcttttttcaaagagttaaaaaatgcatattcacggttattgtatcaatattatcaaaataagatcattgggcaacaaagtacaaatacttgtaaattaaacgatagtttaatgatgacacaagctgtgaggttcatgtgtataaaaagataatagaaagtgtaacattacaaaattggaggtactcaaatcattgatagttaacagagttagcatcagccacattgaataatttgctgaagatgcgaagttgattgcttgacttttggaattggaacatgcatctcactcacttttcagaactcagctctacacgtgatacttaagttgattaccccccaaccgttcttgtcagttcattcaaccaacagcgcattactcaattgaattatctatagacaaaccaacatcaacaatacaatgtcaactttagatactagtgctagaccgtcatttgcaggtggtacacgtttatcaaatatatcaacaagccaatcaaatactcaatcaacatcatcaacatttaatgggaaatcgaaacctaatattattacaccaaaaattcaagaaactcatttaggtgaagcaattcaatatagaactcaaatactttctgattttagagatttaggtcaacctgatttagtacatttatcaaaatatgataaatcaataaaatctgaagttggtgaatatcattatgttacaggtatcaacacattaaatgttatacagccttttatgtatttacaaactattcaattaaatgacaaagaagttgcaactaataaacatatgaaagttggtacatattgttgttataatatatttagtaaaggtgatttaagaattagatgtcaatttcctggttctacatcaccaatgattcaatttgtaccatcaaataaaaataagattacaattaatttaagttcatcagatagttcagcagtaaattcatcaaataattcaacacatgatcttaatgaatctaatggtaatttatcaagtaataatagaagtcaaaatatatggtttgaaacatacgtttcatcattaattcgttccatattatttccagatttaattgatagacaattaccaggtatgtgtaaatttaatccgattcaatcaaccaaggatgctaaggaagcaattaaattaatgtgctcaatgctattcagaggtgtcgaaactggatgtactgatatttataatagaccatcattgatcaataatcatttagttgatgcattgttaaaattactatcgattagtaaatattataatattgcaataaaggaaattgaaaatttaatgactaaaaaattaatcaatttaaatgttttaattgttaaaattttaattctcaaaaatgattatgcaaaagcagttagactaatgcatgattgtcttattaaaataccaagagatggatggatgttaactgaacaaacaatatttttaattaatcaaaatagattagatttagcgcttatacctgcacaaattgcaattgaatgtttaccaagtgaatttttatgttggaaaaatttaattttaatttacattttgaagaaagattttaaaaatgcattattagcattaaattcatcaccaatgtatacaaataagagaaaagatattttttctgcaattaaaccaaaatcatatgaattttcattcccattagagggtaaaatcgaaagtatttggaaagattgtgaatattttggttgtatatcaggtattggagatatagttgaatttacacctaatttagagattaataagattaatagttatagattaaaagtttatgaagagacaaaactcaattgtacatttaaggaagcatatgatctattagcattaatgacacaaaaatgtggttggggtgaattattgaaaattagaagtgaaatctttgttatggaagatgaatataatgaggtggttaagaatgagcagaatttagaaaatcaaaaaagtgatgttaatggaggtgataatgaagataataaaaatgatgaggatactaataatggtttggatatcaaacatattaaaaatacatctactatttcattaactgatatttctaataaatttaaatctaaaagattaagtgaaaaatggttagattcattatttttaatatactatgagaacttgaagaatgttttaatttatgaaaatgatattaagaataaacctaatattcaatatagtacaactgaatgggaattaatagcaaatgaatgttttaaagttcattattttaaagaagggttaattccatttcaaacatgtttaaataaaagatttagtatttttgcgtgttataaacttctcaattattaccttgattattctaaacatgaaaaactttttaaagaattgaatggaaaggaatcaaatgataagaatgctaatgatgaatacataaatgagattaagattaatacagatgaaattttgaaattatgttgtaaattaattagttggagtgcaagatattatggagaatttccgatattatgtttacaagtatttgatgaattgaagaatacaacagatttggatagtgttgtattaaagaataagattgaagttattttattagatttagaaactgaggaaaagaaaatacgtaaagaagctacaagttctgaaaaaacgctgtataaagatatggacattggacaaaatgttatgggattagtggatagatatatttcttggttagatcagtttacagatgatgaaatgtagtttaaaattgtatagaataaaataaattaaaatataaggtaaaacaagtaatactaatactaaagacaaccaaatagattacaaaacgtcgatgcgtcgaagccatgaaaaattagctgttttcgtaaaaaatgaaaattgtcgagcgagagaggccctctcagagtcgagaagcgagaagagagagagaatattattattatgatgatgatgatatttatactgttgaaattgaaatgtaattggaatgtaattggaaaattatgttgattggattaatttcgtattttgcattttgcatttttgtaattttatatctattgtttcttattatcttactctataagtaactgttattgtcagtctttggtagaacagacataactgccccccttttgtttttattttaaatcacattgttgtttattggaagaatttaactctattggtgtccattaattaagtcaatcatttttttttctttctaattataacaattaatatacatactacccatacatcacataaacatatcatctacatatctacatttgcattaatttgatcaattaaggttttattgtatcattttaaaatatatttcatctttactaatcataaatactattttctatttcaatcacaaactaaaaccctaattattttttaaattttattccctgtatattttgtctttaccaattgaaaaaaaaaaaaaagaaaccagaaaagaagaacctcttataatatctaataattaataataataatcaattatgtcaggattttggaaatttacaagtaattatgcctcaagagtcagcaaaattttagagagtaaaaatattgttttagaagatttattagatgaaagggaaactgtatctgaattattagcttctaatgcaaaattagttgaatatctcagacgacctgaaatactagaaaaattggtagattatgtcgttgaagatgatgaatatcaacgtaaagaaattgaaatggatttacaagctcgtgaagaattggaatttgatgaagaaaataaattaaataataataatgatactaataatgataatagtgatgatcatgatcagtctgaaaataataataataataatcaagaagatgatggtgatgattttaaaaatgaaaagcaaaatgacatctcacagaatgacaatgatatcaataataaaactgaaaaagctgatactgattctgaaagttcaaatgaaaataaaaagacaaatcatcatgaagaaaatgagcaaaatgatgatgaagaggatgataatgacgatgatgacgaagacgatgatgaagatgacgacgaagatgatgatgatgacgatgatgatgaagatgatgatgatgatgacgatgatgatgctgaaaatgttgaagaaaccgaagtcgaaaaacacacaagaagagctcaagttgctgctgaaatattatccattgatgtttggtctataactgatgcatttatggaaaatattgaattattacaaaaactttggtgtattcttgataaacctgctccattacctattttctctgctacatattttatgaaaattaatgaacatttgcttgatatgaaaactgatgaaatgattcaatttattcatcaagaatcaaatttagttgaaagatttatgagacatattgaaactcccccattaatggatttcttacttaaagtaatatcaactgataaaccagatgatttaactggtataattgatgttttaaaagatcaaggtttaattccttcattgataaattttctttcatcggatgttccatcatcaatacaaagtgctgctggtgatttcttaaaagctttcattacaatttccgctaataatgctgagaatacaactatcggaccaaatgaacttacaagacaattagtcagtgaaccaattgttagacttttagttgacaaaatgttacaaggtggtacaggtttatcaaatggtgttggtattgtaattgaaattatacgtaaaaataattcagattatgatccggtaccaattgtttatgttacagtcgaatcacatcctccaacaccaagagatccaatttatttaggtacattagttgaaatttttgctgaatcattaccaaaatttaatgaattattaaataaaaaagttgaaaaacaattaaatacaccatttggtacaattgaacctttaggatttgaaagattcaaaatctgtgaattggttgcagaattaattcattgttctaacatggcacttttaaatgatcaaaatggtgcagaattagttaaagaaagagatgaaattcgtgtattattaattgaaaaacataaagagttaatgaattcatctgatgttaattcaaataattcacttgatgcatcagatgttttaaaagctgttgaaaatttaagattatcaaaacaaagtgaagaaacagatgaaaattcaaataaagaagaagttgaagatggtgaaaatgctactaatgatgaattgagtctgaaagaaaatgatggtgatgaagatgatgatgaactcatattaagaaagaaaccagttgttggtgatcaattaaaaatttcattatatgataataaaatcatagttactatattggatatgtttttcaaatttccatggaataactttttacataatgttgtatttgatatagttcaacaaattttaaatgcaacaatggaaattggatataataaatatcttgcaattgatttatttgatagatgtcacataactcgtgcaattattgaaggacataaaaagtgtactgaatatgaagaagaatttggtttaagattaggatatatgggacatttatcattaattgcagaagaagtcgttaaattcatttcattagaaattcatcacaccacaccaaaatctagtaaaattgatgaaagtgttgaaaatgaggaatggaaagaatatgttgatgatatcttagcagatattagaaataaatataatgcagttttaggtagtgatggtaaacaaatgaatgaacatgatatgaatttattccaaaaagtctatggaactagtgaatatgcagatgatgacgatgaagatgatgatgatgttatcttagataataatgaaaacggttttatagatgctgaagctgatgacgatgaagatgaaaacaataataataaaaataataatgaaattgaatctgataaattcacaagatatataggtgaagaaattacaggagatttacctgatagatttggatcatcagatgatgaatcagaagatgaaaatgatgttttgattggcaacaatagtaatcataacgataataataatattgataattataatgaaaataatgaaattataactgatgatattgaaggtattgttgattcacaaatgggtggacatccatatcatgaaatgtcagctggtgaattggatgatcaaacaattgatattgatgatgacatgtatgatgaagatgaagttgatataaatggtctagatgatgaagataatgaacgttataatggaaataatagttatgatgattatgatgattacgatgattatgaagatcctaactgatgatggtcaatcatataaaagaaatgatcatccattatatcaatcagatggttcattaagatcatcaaggtagtgaacaaattttaggtattgatgacaacaattctgaatagataaaaattgagtttacaccatttcattcatgtattatctgtcaatgattaattcgtttttcaattttataaatttatgtacataatttatgagatcgtcggttttagttcagtttaatttattttagtttagtttagtttagttttagtttaatttagtttagtttaatgttttataattttatgttttatattcaattgttatactatgtagcttccggaaaaaataaaatacttattttaaaatttagctttctcttctataaatggctttgatacaacttaattaatgataatatacagtttttttttatacgagagtaatatgattaacgagttttacttatagtgtcaccaacttccagtatcaaggaattgacaagttccactaatttctcctttttatctaattgcttttgatttttcaatttcagcattcttcaattgatttcgtagatcttttatagttgataattgttcagcttttgtaactccgacaccgggtaacgtatcaataatagttaatatttgacgagttttcaatattatatcagttgctagttcttgttgacttgattggaaatcaaattcagttggtggattacgatttggatcaatcctcttttggatctgcagggtttaacggaacggtatcgtgattttgatcaacgtaagaaagtgcagagaacagtatatctatcagttgatccatgcatagttgtagttgtgtaagacggtccgtcattgtctttatatgaataatggtgttgagtttcttttatcttaatattgaagttcttcacagttacagattcatgttaataaatgaggtatcgtaatcggcgcgtcgattctgtaattttaactgaaacatgtaataagatttaaaaatttatagtttttattcagttttttcttgatttactgtttaaacttattttcttcttcctttgtaacacctttattagtaaatttgaatggataatttatgacccagtagtattataacacctccatttatattcaatagtgatttaagggcccaattaataggcataaagaggtataatgtcaaattaataatatattgaaaaaaaattacgacattaattcttgttgtaactagttgatacttatagtaattattgtagaagcgagattcactactgatgaattaatagattattaaaggaatctcagttttattcagttatatgagtagtatgggtaataatgtctgctgatttctgggtatctacacaaagatcacattggcaattcaccaaggaacaattatcaaatgcaagattatctatatcaacatgggaaaaacagaaattttcaaataatgcaataattgttcgatatgacacaaatgtaagaatttatattcatcaaatgattgcaaaattaggacgaagactttgtttaagacaaattattttggttacagcagaagtttatatctcaagatttttaacaaaagtttcattaattgaagttaatttttatatgttaataactactgcagtttatcttgcatgtaaaatatgtgagtgtccacaacatattagatcagttttatcagaggcacgtaattgttggcctgaatttatatcaattgattttactaaattagcagagtttgaattttatttaattgaagaattaaattgtttcttaattttacatcatccatatgattcattaatacaattggtaaaagtattaggaagtgaatcatcaattgaaaaatctttatcatcaaattctaaatatcgtttaaatttaactgataaagaaattggacattcatggcaaataattaatgatagttatatgacagatttaccattattatacccacctcatataattgccattgcatcattacatttagtgttaatattacaattagatttaagtgatttagacaatacacagatttcaaaaacaaaaagcactagagctaatagtaatggaagcaatggaagtaattactagtgccaatatgaatatgaatacgaatacgaatatgaatatgaatttgaatttgaatttgaactccaatattacaaagaacaaccaacctttaatatcgggcttaaatatcaaactcccatcactcgatttcaacaaacaaactacaattaatgataataaggttaaagctacaaataaaaaaaacattagtggacaatatggactacgaaggaaattaagtcatacattgcgtcaaaggatgacaaatagtttgagtccagagaagtttgcctcaagtcaaatggaaaatagtagcaatagcaataataataccagtaatattgctaatggaagttaataattcaagaattgaagcatttagtaactttttagcaggatctaatgttaatttaggacaagttatggaagcagtgcaatcattattatacctctatgaggaatggcaacattatgatgaagttgcagttcgtcaaagtatcaagacattggttatgacaatttccagtatcaccactaacatgtaatttgaacatgttgtaatagttatgtaatattacgtaaacaattatcaattacctgggttatttaaagaagtttttcaaaatcttacgttatacgagagaggcatgttttttttgctgattcgaaatcttgaaaatttgacttttcatgcattatattttgaagtaaagtcataatataaatttactttggaatactgtgttcatttcattagttatacaggttatatcttacaaatactacgcgtctgctcataataaacatttatttattgattgatgcatttaatgagctgcgattctacctctttcgaaccattatcatcgagttccgatgaaacaagacagcgatctgcattagagaaaggtgttgtctccgaaaccgtcgttaaagaaattaattccgaagaagacagcgttaaagaagaaactgaacatatgaaaagttctaactctaatataaaatcaaaagctaaaagtgaaaaatatattgctaacttaagagcaattcaaaattctgaaaaacttgatatcaaaactattcaatttagtttacttttctacgtattattattcttaacatccaaatatatcaattcctcctttcaagtattttatcaattatcttataattatcctaatgatgataactcatacgatattggattaaatgatatctattttactatattttggataattaatttaatttttttgagaagtttcctcataatttatcttttcaaaccatgtgcaaaactattaggtattaagaagtttgttgcaactcaaagattcattgaacaaagttggtcaataatatattatgttctatcatgggggtttggattttatctttactataaatcagattattttttcaactgttataatatttatgcaaattggccacatgacaaactatcatctgaatttaaattctattatttagttcaaactgcaaattggtttcaacaatgcattgttatctttcttgaagcaagaagaaaagatcatattcaaatggtttctcaccatattataaccattttattatgtactggttcatatatttcatattttactagaattggtcacataattttacttataatggacattgttgacgttttcttatcaggtgctaaaatattgaagtattgcggttttcaaactatttgtgatgtaatgtttgttattttcatggtggtatggataatattaagacatggtgtttatgtttatgttctctggtttagttggattaaagctagagatataatggatatgaattgtgctaaattcttaccaggtcagtttgttaaagcttgttatacagattttcaaattgactttttattaattttattggctttcttacaaattataatgtgcatttggatgtatatgatcttaagggttgcaatacgtgtcattagtggtggttccgctgatgatgtaagaagtgatagtgaagaatgatatttcattggtccacacatactctaataatcatctttactatcctatactttcattaattaattactttatcattcgttacttaatattttagattttttttgtaaatcatttatagaatgtgcataatctcaaaaacaaatatacataatatatatatatatcaagataaaagaaaaaatgtatgatcttattcaaaaattgaggagtataaacatataaccattgcaattaacccccaaataattaaaaatagtgaaatgtttttcagtaatttactcttaaaaattggattatctgattcctccagggaatacttatttaatctattgctaatttcatcatcatcactagctaataatttataaccataaaaaccaggtaagatgaaactaattaaaacaccaccagtagatccaacaatggctaagattaattcaaatgagtttaataagatcgcaaaggtataatttccaaacaataaaacaaaactaatggtatagaatgccaagttggataatgggacatcttcatcttccattttcactatataatcagcagaatcaaaacttgaactcagatgaggtaatagtggtgatctatcatcagtaccacttgatgttcttttcctttgataatccacccactttttagtcataacatgataaatgttgttgaaagatactcttgatggatgaaatattagaggaaatgataaaataaccatcaagatcaataatgcacgtccagtttgtgtaaatatatcattcttatacataagtaaaatattaccttctaatgcattaccgaatgtcaaatatccagatagtccaactgaaataaataatatagcagttattgtcattgaaatagttgtaatttttgcaattcttttcattgttggattacgaagttcaccaacaattgagaattgagttggacatgtgtatgctaaaacaattataccaaatgttttacaaacaggtttgaacccctgaggtttaatcaatgaaaaatcacccaatttatcttgaggaattgatttgtaatctgttgaaactgcaataatgaaattgcaataaattaaaaagcaaatatagacaattgatgtcaatgccacaattgatgtatatcttaaattatcaagtttctttgttaaacttagtggaacaactaaaactgtactaattaaaatatagaaaagactcatagacttcgtatcccatccatcaaatgtatagacaaggggtaaaatatcaccagttagtactaaatatgaaatattaacaccaaaacattgcagaaaaattgctaaatcaaataatactgataaatttggatatgtaattctacaaacagtaaagaaagtagctgatccacgtggaaggaacttggatgatgcaccttgtaaaaccattccaataccatttagaattcctgcaaataaaaggacgaaaacccctagcaaaataccatctgttctaattgcgtacggaagaactaaaattccagaaccaattatagtattaacagtgttcaccactgacgacaatgcagttgctccagtatattcaggcataatgatcaattggaatgaagagtgtcgatctacttatataagtaaggctttgttagaattattcaaagatcacaaaccacactcggcatgattagtaaaattactttaatgtcatgtaacacggcaaatcaagttctgactccgggcatgagtcttttttcattccaaaatcaaaagtttattgtcttcaggatatactcagctagatatcaacagaaactatgttgaataatactagattacaatcgaagagtagagcagtctcaaaagaaagaagaaaaagggcccttttttcatgtgacagatgtaagttacggaaatctaaatgtaatagaatacagaataatgatttgaaatacgataatataacgccatgtgcacaatgtgtaaaagctggggtatcatgtgtgacatcaatacccagaaagagaagattttatggatcagtaaagaatatatcattacattataaatgtcttttagctcttgtgacaggaattttccccaacaatgatatctataatatcgatgaactaatgagtttagggcatgaattaaagttggaaatgcctacccttgataattttgattatggagagaagggaacttttgcaaatcttaaaaaggaagctgaagaagaagctctagcagaggaagcagcggaagccgagacggaggcagaacttcgacatcaaaatgaacataataaaatcattattgaaaaaaacgttgaaaattcacaaaacgaaaaagttaatcagattgataaagaagaaactgttttgagtagtgaccaatctaattatactaaaaatgaagttaacgaagagaatgtaactatcaaaattaaaaaagagattgataatacttcaagtgattattccagtgatacttgcaaaactttaaaattgatgaaaaaactgaatttaaatagcagtgaaaaggaaaatgatactgaaatcaaagattctgacaaattaccagtcgaaacaaaaacaaatattaaattaccaccgaatgttaaaattcctgcaagcaatctggatcgtgaacgtttgattatggataggtttggtcatacccatttcattggtaactttggtacagcatctttattaaatggattgtgtgatattattatcaaaagatcgtataataaagtatctccaccaacgtctacacaagatatacgtgacagttcagttcaaacaattacttcagaaacgacgcctgtttaccaatatccgacacatttatacaatatggatgaaattaatgttgacagattcccattgattaatatcgttggaagagaagaggcagatgtttatgttagtgttttctttgaaaaggttcatccatattattttatttttaatgaagacagttttatggcaaaatacgaaatattttatgaagatttggatattgacattacaaaagacagtaagaatagaacacacacactttcaagattaagcagtgccgagatttgttcaatttacacagtttggatcttaggcagaagatttcagcaatattctaacccagaaaatcttccaacggatgctgtattagatgaggaaatgattggaaaatttatagatattattaaactttcattagctgatgtagtgttgactccttcaattgatggtattagattattaatcttattctcagtttatttatccagtatcaagattagagaaagtggttattgtttgatggaacttgcatcaattcaagctaaaagtttagggttgcatagaaaatcaattgttaacaaatttaatgatgaaaaatcagatgttatgaaacgtattttatggtcattgactaaatccgaaactacattatgttgttcatttggacgtgcaagtgcaattccatgggaagaaattgatattgacttcccggaaatcaatgatgtgaaagatgaacatttcaaaatcttctatctacaaagttgtaaattaactaaaattatctttgaaattttagattataagaaaaagaatcaaaaagatccattaagtctagcaagtgttgaaaaggcattatactttaaaaataagatgcaaaacttctggaacaatttacctgaaaaatggaaagattataagtctttaccaataaaacgttacaaacctaaattacacattcaatatcactattatcatatcacactcacattgccaatgtttttgtacattgtcaattcacataattatatcatcaaaaatgatgatccatttttatcattattggtatgtggtatacagtcttctgtcaaaaccgcagaacttgtcagttttacagactctaaaggttttttcaatggtacaatttattatgacgtattctattgctacaatgctatcatggttttaacattaacatatattcttttcaaaacaaaggcagtaggtaaatgtaaagaaaagatcgatctgaagaatttaaatgaccaatatggtattaatcttgaagaaattttaaagtccattaatttaattagaaagttggttctaggtaacttgcataaaattgatggtacaatgaagagaatgtcagacattattgaaacattacttgctgatcttgggattattcaaactttagttgtgaaatataatgcaccaaagagtaatgttaaaaagattgaagatagacaagaaagtggtaatacaagtgttacaagtattccatctggttatagtcgtattaagttacgttataacaaatctgagaaaaggaagagatcacctgtttcaagttctacttcaagtaaaataaccaaagcagaaaatattgttacagataatactgaaactaaaaataaatcagtattgaaaacaactgatgatttgtcaattcataaaataaatgctgacccagaaaaaatatatccagcatcgaaacgttcaaagtcaaatccaccaatgacggctagttcatctgatgatataatgaatttgatgaatttcaaaccaaatgcagcacagaataaactgatagatgaaatgaaaaatccattgattgattcggagtcaagcacaaatatattccaacaatatcccgaaatgagcaattcttcgactaatatgttattcaataatacaccatcaattacaaatactccagtttatagtggagatggtatacatgttgaaaatgaacaatcaagcaattcttctgatattaatggagtgttaagttcattgagtttgaatactgatcttatggatgcattatttggtacagatatacttaatttagatatggatgccgatgaatatctttttatgtagaaatctatgtagtgaaagccaacacaacctatatcaggtataaaacaccatacatcctgtgtattatatagaataaatcataccataattgtaaatggcttcatataatgatgagaaataggaaacctgttcaggtaatagtaacccgataagagatgcgaatatgctatcttttactcgattaggaaattttgtgcatatttttttctgctgataaagatggttactgatgatggatctctggtacaagttataataaaagcactttaccagtccctgttatttcatttttctatgtactattgatgtataattatctgagaatattaaatacttcatttttactcaaataaagttagacaatatctgcaaagaaatcacattaatcaataacctcagtcttttttttttgttttgctaccaattttgatacctataaacaacatgcaatcagataacgataactactacaaattacttggtgcaggtactgcaatagcaaccgtactttattttggaaaatacgcttatgataagtttaatgactcaaggaaattgaaagttagaagtagaagtaaaggatatggtacaagtgagaatgaaccagttcctaaacctacaccattaatgattacaccagagcaagttaaaactagagatgatagaccatggagacctttcagatggccataccatcaaaccatgtcaatctttaaattagacgttaacaattggcttgacatggataaatactattaccaatatattaaagaaaaagaaagagttatccatacctatggaccagataattttgattggttaccaggaagtgaagaagcttgtagggaattaatggatattgttaaagaacatatgatgtcaaggtacccattattatttacaactattgataatggtgatcatgttacaaatgaattaactggtgaagttttagatttttccgaaccattaaaagatcatccagttagtttatgtttctaaaatggcaaaggaagatttctatattgttttaaagggtgatgatggaattcatagattagttgcagctgcagttccatttccaggtggttcatttggtattaaatacaaattaggtaaaactttagatgttattcatagtgaagttccatattatacagaaaaattaaagccatcaatggaaaaatggtttggtagaatgaaaccagcagatttagttgaaagagcatcctggtatatttcatgggatcataaattattattgaacaatgtttatgcattaaaagaaggtgataaagttaatagcgatgttttaccaactgaatttaatgttagagttgaacgtcaaactttaagaagattaccaaaatcacaagcaattattttcactaatcatccaattttttattcaattgaagaaatgaaagatgaaccattggttccatcattaattagaaaaattatatatgaagcaccagaaggaatttgtaagtataaaaactttcaatcatttagagatcatattcttccatatcttaataaactggtggatagacaaattgaaaaaggacttataacagaggaaacacctgtgaaaacattaccaacatatccatttgcatatttcttgggtaattcaacctcagagaaaggctgggccaatcctgcatacccaaataattacagtgctaaatttgaagaagaaattaagaatgcaacagagttggaaagagaaacttttagcagggctgctgaagttggtactgttgcattttgataattactttattctttatattattacgttctgcttttcccatgtgtatttttttatttgaattttaagttctattttatttatgattgattatttagtaaaaagttatattatataattcaaaaactactataaattattttctttaacaatacaatgtcactgacatttttgataaattcatgttttggtaacgagggagttattttatagttatcaaaatttaaagaaacattacgattctttatcagattggaagttgatgtagttacgccaatcattgataagttaactataccttgattatcgagagatgaaattatctctaaaaattcagatcttttcagtaatgtgacatgatccaaatctttacatttttcaatataatattcgaaaaatgattttaatgagatgtcgttagcagaagaaatggttttgactgtatttgagtttgaatttgcagtagtttttgattttagttttaatttttgtaattcagcttcaattttttcttcatgtttgaaaaggaacgctaatatcatcttttgttgaattgttaaaggtttaagtttgaggtcaaagttagcattgaaagattgagaacaaactttaacaactgaagtaattgtcatttttggtattttttccaatggtgtaattgaagaatcaagtataatttttaaatcttcaatatcagttgatttgaaaagattttcttgaaataaatttaatgaactatacataatgtcaaaagctcttcttaaatcaccgttagttacagctgcctttttagaacaaaattgaattgcagcaggatgaacaattggtattgagttatttttaattgaagatggctgaagtgaaattaatttatttgaaatgactgattttatttgatctgctgtgtaaggtaagaaagaaactaatttcggatttatacaattagctcttaatcttggtaaaaaacgatcagtcaagtttaaagaattagcaatacctattaataaaatatttggtttattttcagtttgaataatatctgaagcccaagtaaataattcaaataatgattgttgagattttgttataatattatccatttcatctaatataagtatacttcatatcacaagctattttttgaatttttaggtgaataaattataaatattttgattatcaagttgacttctatatgataaacctgttatattttgataaatttctttaaataattcagttggagaattaattgacatacaattaaatttaataattctaacttttttatttaatttttcattatttaatgatcgtatgaaataaatattttgagattcatcaattaaatcagcatcacttagttaattcatttaaagttgcattcatttgagctgatttaccagtacctggagcaccagaaacgtagatagaatttgattttattaaatttaaactttcaaaaatataatctttcagtattgaagcttccttttctctaccgctaaggacaaattttgaaattgagtaaggatttgaacttcttaagaaaagatttttagctttagaatatggtgaattatcctttaaatctgaatatattattgatttttgattatatgaactatcttcagattttaatgattgtgtaagatttttacttacacttttcaatgttgaagttgttaaattttgagattttgaaatcaaatgtttaggagttacaggtggagataataaacctaaatcattcgttactttcaatattgagctgttattatttaaatcagttttttgtcttttaatattataagattttttaggtgaattttccggactgtaaattaggttttcatcattttcattattaatgtaattatttgatcttttctttgttgattgaattagagacattggttattgattaatgatattatgatagatagaatgagtgaaacagtgatgtgaaaagaaagagagatgaaaggggagtacacgaaaaacacgtaaaagatgaagtgaaatcaatgcaaagtggtttaattcaggattaattagtataaaatcaataaaatcaatttgaaacacgaaacctgaattaaaaaaattgatatttacgcatcacttaaagtctctaccccttgaattggtggctgttggtggctggtatttcattataatgaatatttaattaattcccaaaagggaaggtggcccaaaggggaaataaaagcgaaaataacaataaaataaaataaaaataaaaataaaaataaaaaataaaatagacgcgactaccttattacgtaaagaagtaagaaagaaaaaaatttccaagacaaactttcaaggaaataaggaaatgaggaaatgaggaaattgaagattaaaataataataatactgaatttattattgaattaagtaacaacaatattaataaattattataccccattttcaatttctaaatttaattaaaatttatgagccagttgtcgtactttcttttaccgtttcccttcattttacactccaaatctgcttttcttcttaatatagattgttaattcatctactatctctttgagctatcgatagacatccattttagataggtttaaagtattttaaactacaatttatccccttaaaaattatattatatatcctcctaaattttatctttgtacattacaattttatgaaattcaatcatatacaacattcaatcataaatataatataatttaatataatatagaatggctcaagatcattataagtctggaggaggacgatattttaaagatgaatcctccaaaagacatcaaaattattattcaaattctaataataataataataataataacaataataataacaataattataattcttcatcttattcatcatataattcaaaattttcttctttaaaggggaaatctgataataaattaaataattcaaatcctttttcttctagaagagatgttgattataataataaatcaatgaatgaatcaaatcaatcacgtatatggcataataataatataaataatccaaattcaattaataataatattaataatattaatattaacaataattcatattcaaattcttatagaccttcctcaggatcatatcgtcgaccctcatcaatatcaaacaatttacattcttcatcttcatcttctttatcaccatcttcttcaattcatcataatagaagattaaattcaaatcaacgatataatgattatagctcttattcaaattcttatgataataataaatatcataataatatgaaaaattcaagaaataatggattctataattctaatttctcaaatcattcaattgataatactcaaaatatttcatcaccagcaagatcatcatattcttcatcaaaattatcatatcatgaaaatatacattcttctcaatcattggattccaaacccaacaatgaattgaaattaaagaataatgataattcaaacgatgataaagataaagataaaggtgaagatgttaaaaataaagataatactgtacataataaagaaattgatgatactattgaaagaagagaaaaaaatgttgatcacaaagatgatgaaaatgatgaaattgatgaagatactgaatatgaaccttcattaagctttaatgtcaatgttaagtctgaagaaatacgatcagattctgaaattaaaccaaatactaatgaaatacttgtaaatatctataatagttcaacatccaaagatgatcacgagaagaagtctattcaaaatttaaatgaaaacaatgataataatactaatgaaaatattgaaaagattaataagacagaacctgttgaagaaattaaaactgaaaagttagattccaataataaggaaaatcttgaaaatagtaatgtaaataataataatagtaatgaagattcacagaataatgaaagttcacaaaatatagaagttgaggaatcaaatgatgacataaataaacctatcattgaaggatgtatttttccaatgaataaattagaatataaattatgggaattgaaaaatactccaaaatccatcagaaggaaaaatttgaagtatttaaatgaaaaaacttaacagttcacatcaatataacttttctgcagattctttccttatatttaaacaagcagatgcctttgttttatttaatgctttcaaagaaattgaacataaggtaaagtataaaaaatcaaaattaactgatcaatatatctataataaacatttatgggaaaaagatgtctcattttatgataaacaattagagtcaatttatggatcaaataatgaaaaggagaaaactattaaacctcaagatgaaaaggttgaaaaacctaatccattacaaacaggtaaaacaactagaagaagtagacatcatggtgactctgttagaactgaagcggaatttttggaaatattagcatctttagaacaagaaagagagagagatcctttagtcagagctcaatatggtgctgcaattatacctgatatgattatgaatccaattgaaaaatatgcaactctaagagttttagattccaataatttaattaaggataaaaatcaatgggcaagtagaatttcaactgataaaattgatacattttctgaagctgagcatgctagattttgtgaagtatatgctaattatcctaaaaattttggtcgtatatctaatgaattgggtactttaagaacatctgaagattgtgttttacattattatagaacaaagaaggaaactaattataaacaacttgttttaaataaaaataaaagattgaagaagaaaaatgtttctaaaaagaagaaagaaataaagggtaaaggtgaaatttctactggtgaagattcaaatgttgatataaataatagtttcaataatacaagagaaggtgatgatttaacttttgatgatgaaggtgatgatactaagaataatgatgatgaaagtaacttaagtaaaagaaaaaccattggtattactgttccaccccatccagaaaaacttcatcatactgtagaggtagataaaaaaacttcaagtgtacaagaaaatattagtagggcaactgaaactccaactactgaagtacaaacaacggaaattcaaaaacccgaaactgagacaagtgaggttcaaacacctgttgaattgaaaagaaaggcagaatctccagaaactccgaataaacatattaaagttgataatgctggacattcaccagcatttgttcatcaagaaaaaagcatcgtaagttccgttgaagttatagaaaatgataataacacatccaatgccgaaccgatatcaaccgaaaaccctattgttccaatacctgagattattgttgcaaatgccgataaagatcttcatcaagaagaagctagtactagtactaagaataataccaataatatttctaatcttacaaatgcttctactatagctgctccaacatttacaactgaagatgatatggaaaaaagatttaaaaaatttaaaccaagaagtgatcatatttcaagttattggagtgtgcatgatattactaaattccctttgctattgaaagaatttggatcaaattggaatgatattgctgatgcaattggtacaaaatcggttactatggttaaaaattattatcaaagaggtttagttgatcatcctgaatggcaaacgattgttcaaatgaaaaagacacaaattgctaaacaaattcaaccaatacaacaacctacaggtcaattaaatacattaccacaagtaacaccatctagtcaacaaattatatcaccaactaatgatcaaaacatagctactcaatttgttccacaaatttcaagcttaaattcaaatccaccattacacaatggaccatcaatgggttattttttcaaacctgaaaatgcatattcagcaagtttcccaagagatcatgttccgcctgtacttcaacatcgtgaagaacatttacctcacttagagaatattccacaatttgttccaataactcaaactacaccattatactcaagattcaattttaatgaatcaattcaacaacatcatataaatcagccgccaagttctaatcagccacatcaattaaacccagttaggaataagatgatgaatatgtcttcactattgaatgcaagtaataatgctccacctgtttcagcagttaggcctaatattcaattacctccattaagtatgtttggtagtggcaataatatctcgaatccaatcccaccaccattgagtactgttaatagtactggaccaagaataatgaatttgttgaataatgataatatcacatctgaacaatctacagtatcccccattcaatccacaaccaaataatctattaaatgtttctacaacaatcaaacacgaacctcaacaagatcaaccacaacagcaacaacagtcaaatgctaactcacagtatcaaaatacaatgttttctggaggtacaagtgcgttagatgctcttgctcgtattgcgtttgaaaggaaataattttatgttaatataaatcatttttgtatatttaaatctcattagataattgtatattatagttgaattaaattatttatttattaatttatttatttaaaaaaaaataacatatttgaatgaaattaaacaaacgatacatattgcttttatagaagatataaagcttcaaatataatagaattcagttaagcggctacagcttgaactacaattggttcacattctgtgaaacttgtaccagtgaatgccaattgtggtatgtttgtagaataactgtaaggatcactagtattcttacaagcaagccaaccactaggtttcaccatcaattgctaaataactatcgtcaatagtgaaatcaccatttggaccaacaacagaaaattgaacaaatccatcaacttcactaaagaaaaatttataattttcttcaaaagtactgtagatttgattattacaatgattgtaagtataaacaggggaattttcacctgctaagaacaagtaatttatacctgcaccttcatgataatatgaaataccagttctagtaccattatttgatattgcaaataattcaattgcatgttcacatgaattatttgtggcatttgaacttgatgaaattgtaggtggtggtgttggtacaattgttgaagcagaagttgcaattgttgtaccaataaaagtaatgaattttgctaatgtggaaaatttcatgtttgctggattgaactacaatattacttttctgacatctttctaaattagtgtctgattcgtaggatatgtcctggtttatatagttttgtacatagttgtaaattgtatgccgatcagtgactggaacaatttttggcttcgtaaagattcaaaggaataaaaagctgaagatcgttgggccctgatttttggtagcagaaaaaacatgctttctaaataaagaaacaaatttaaggtccagatttgagattccagaattattttcatgtatgattcgtattttataatgcttttattcagttataaataacatatttagggatatacggtacaaatttcacatatttattactgttacattgatgatttttcttttttcttgattttgtgtatataatttattaattttaataaaggtcatcaatcaaccttatgcctcagaatcactatcactatcataatcttccatcgattcttgaatgaatgtacaaacttcatcaaatctttcatctattataccatctaaaccttcaacatcagctcttaaaactctaccatatttctttctcggtctcttagaatttgcagaatctttatcaccccaacaactatgcttattacttgtaaaaactaatgagtttctgaaaaaccaatccactatagattcatcaattgttgaaataattgctcttaatgctgtagctttatcaacaaaatttatacttgctttaactaattttcttacatctctatgtccacataaatgaattataccattataagcttcaccaacaccaacgaatgcaattttttcaactttgaaaaatttaaggaaattatcccataaataaagcataatatcctgtgatgttgtaatattattatattttatatcatctttacctgaaactgttattggtatatttatatcaataacaccccatttttcctttaatgcccattcgataaaatttaatgatttatcaacagttactgcatttgcagaatctaaatcaccagtaattggatcacgtcttgcccaaatacgtgaaggatcatgaactattataactaatttatcattattataaatatcaggtgaacataaaattgttgattcatttattgatgttgaatttggtaatttttctgtaagtaaaggtaatgtactaaagttgaatttttcaaataaatctaatctttgtgaatctcttattgaatcattaattcttttatttttagctgcaacttcaataaatgttggatcgggtgatgatttaattaaattatcataattacccattatgtttggtaaattaaagtctaaacctaaataaccaggacttaaagatttccaatattttgattgaattttaataacatcatcaataacttcgattgattcagttttaggaaattgaacttttaattcctctggaggttcaccaattaaaacttttgcaactcttaaagcggatttagcaattgaatctaaattataaccaccttctaaaacaacacataaattaccctttgctaaacttttcaacatatgtgtcatttgaccataacctgcgggggaaacgtgacaacctccaataacgtcaccatcagctgcatcaaaacctgatgaaattataactaaatcaggttgaaattcattacatattggcataacaactttacgaaatgcataaatataatcagcatcaccaacaccgccaacaggccaaggtatattgacatttctaccttcacctaaaccttcaccaacttgatctgcaccaccagcatttgtaccaggataatatttaccctgttcatatctatgtaatgaaatatataaaactcttggatcattaaagaaaactttttgagtaccattaccatgatgaatatcccaatctattataacaatttttctaacactttcaggataagattttaaaatcgcagttgcagcaactgcaacatttgagaataaacaaaatccaccaggtgcttgaggttcagcagtgatgacctggaggtctaacaactgctagagcatttttaacttttccttcaacaactgctttacaagcttcaattgcaccaccacatgataattttgcagataaaagagaatcgttattaaaataaacagaatcacccttttcagtttgttttaaaagttcttccttattcatattatgagttgattcaataaattttaaatgttcttcagtatgaactgctaaaatttcttcctttgaagcttctctaattggtaattttaacatataatcaccaatttcatcagatcctgataatgttggatcagttattaaaccatgttcagctaaaattttataaattctataaattcttcttggatcttcagggatgtggatcaatatattcaaaatatgatgtataaattttagcatgatatctcattctaacatcataaactagaccagttttcaataatatatatgataaatcaggtttttgaggtgaaactattatatctgaatcttcatgtacaactaatttttcctttaatgtttcaacaagtttgatttaatttatctttgttattactattattattactgttattattcatatcttcatctgaatctctcattgcaatatcaccatttgaatcttcagtttttattgaaactgatgttggagcagttaattgaccattttcaattatgatttcattttccagttcatcatgatttcttttagtcgacacggggttttccatgaccatgattattaccctaaagagatggataggtaaagaacgaagttcaaagaaaaagatatacccaaaatcaaaagaagaaaactgttactgttaaactgtattatcatcgggaactccatcgcagcgatctgctcttataagagattcttctgtactgtaaataaaaattatttttatttttatttttcaaattttttcactgtagaattaattatttttcagttatattaacttaacaagacaaagatgcaggtttatagagatgcacaacagtttttattaccatctcagaagaaaggttcactacagagtagagtgtttgaaacatgtaaaaataataagaatattaaaaccaatccgaaacatttatttgcattagtttcatcaactttaaaatataaaccatttattttacatatactgaaaaagtcgaaaataatggaattagagaaaaaatctaagatacctgaaccaattttcatactaatggttcatgatttactattttctaaaacaaaacgtattcaaagtaaacaacatgcatggaaggatgcaataattaaaaatagaccaagacttgaggctgaattagctagattaaagattaaacatgcagttaaatcacttgatgaattaattgaagatgatgatacaccagttagatggtttagaactaatttaattaaaactaatactgattcattattaagagaattttcacatttaaggaaagttaattcaattgatgaaattactaatacaggagttatttatcatgatgaatttataccaaatttatttggtattcatccaagggaaaaattaacttcaactgatgcttataaacaaggtagagttattattcaagatagagcatcctgtttccctgcacaaattttaaatccaatacctggtaaggataaagtaattgatgcatgtgcagcacctggtaataaaacaactcatttagcatcattattaaataattctaagagatctattgttgcatttgagagagataataaacgtataaatacaataaaaatgatggttgaaaaagctggtggattagattgtataacgattcatcatgcagattttacaagcacaagaccacaagattttaaagaaataacaggtatgttagttgatccatcatgttcaggtagtggtatttttggacgtgcatttgatgaacaagattcaacaattgatgaagatgaagcaagggaaaaattaaatgaaagattagttaaattaagttcatttcaatgtacaattgttaaacatgcattaagtttcccaaatgtacgtaaagttgtttatagtacatgttcaatccatgatgaagaaaatgaaggtgttgtaaggcaattaattgaagatgaagaagttaagaaacaaggttggaaagttagtaaacgagagaatgttttaccaacatggtcaagaagaggacatcctgaagttttcaaaggttatgaaaatgcaaaagaactagctgaaggatgtgttagatcattaccaaaagttgatggaggtattggattttttgcagtttgttttgaacgtaaattagatggtgatgatgatgataatgatgatgatggagaagaatggacaggtatagaagattaataaaaataaatagattgtttaataattttatagagtttaaatattatatatatatatatatatatatattatattagaattatacttaattaaaatctcttaataatatcatcaataacttcttgagtcgatgaattaccacctaaatcaggagttttaattgtatctgccattaaattagcatcaacagctgcattaattttaacagctggatcagtataacccataaattctaacataagagcagttgatctaatagttgcaattggatttgcaatacctttaccttcaatatcaggagctgaaccatgacatggttcaccaataacaaaattatcaccaacattagcagatggaacaacacctaatgaaccaactaatgcagctgcaccatctgataaaatatcaccatataaatttggagcaacgacaacatcgaaaatttctggttctctaaacattctataaaccattgaatcgaacaatttgttccttataatcaattatattatatttttctttattttcttcataaacttttttacaagtttctctaaataaaccatcagaaattgataaaacatttgatttatgaacaactgtaactgaaggttttgaatgtaaagatttagcacctaaatcagctgcttgttttctttgtaatgcaatttcataagcaatgttagcaattcttttagttgcaacttctgaaattcttttaattgcttcagcaattttttgaccatctttttcataaattttttcttctttaatatataaatcttcagtattttctctaacgataaccatatcaactggtctaccaataccatcaacagatttaacaggtctaacatttgcataaagacccattttttttcttaatgcaacaattggagatgaataacctgcaactttaacagttggtgatgaaacagcaccgaataaagcaccatcacaattatttttcaattcagtaacagtttcatctggtaaagcatgtaccagtttttttaaataattcaaaacctgcatctaaagttttaaatttaaaatttaaaccaaattcttttggtaaattttctaaaatttgtttaccagctggaataacttcacgaccgataccatcacctggaataagaccgatagtaagagttttagttgcagtagtataagatctagctaatctaagcattatttgatagttattgaaggaagagagaataataaaaagaaagtatgtcaatgtcaaataaatcaattaaaacaactaattaataatgattaaatgctgaaaagtgaaaaattacataaaattcaacgtgaaatcatcataataattagtaagagtcattttattataagagaaaatgcgcgttgcctgattaggaaatatcggaattaacctatatttggtgattatatataatcattataataatcattaagtatcagggtgtataaacaagtagaatatatagaatataatagaatatatataggtcgttaagttaataatgaggaacaagaaagaataagtgacattaaataagtaaaagatataaggaaagaaaaagacacaaagaatgatttgataacataacattagcaggcataacaggaataacaggaataacaggaataacaggaatgacaggaataatattgactattataaaattaaatcttttctttcccaaccttgagctttatgattttctaaagtatttgaaggttgaggtcttggatcagatttaatttgtaaagcgaaaggatttctatcttcaccatttaattgtaaatttgcaattgtatgattaacttctctatgttttgcttcatcagctctaatatattgaattaaatcataaaattttgcattttcaggtaatttccaataatcaattgcaatttttggtacaagttgcattcctctaattcaggacataaacctaattcctatatcttttaaacatcttgaataagtattaacagcttcctcttctaaataaccaacaaatcgatgagcagtcttaggtgaaaataaataagttaaaaagaataaatttgcgaaaataccttgaccaacccaaagtaaagctcttgtaaattttgttggtttagccattttaaggaatgttaataaatgcattctttcattaaaagcttcatctaataaagtatcaataaatgctttatcccttctaaataatctaattgcatgtaaatgtcttaagaaagcagcaactgcaccgggaatacctgcaatactttcaagaacaacaaatctagttaaccatttctctaaagtcattctattttcactatttgcaattttaattctatgattttcatcaattggttcaatataaccagtaaaataatcaaatgatttacgtaaatatttcataaaattataagttataaaatctcttggagatttaacaggtctatgttcaaatttaattgcatgcatttgatcaatatcataaccatgatgtttgaaaactgattcagttaaaaattcgccttctctttgttcctctaatgttgtaagtctaactaaatgagtattattcgaaggtggtaaatgattaagatctaataattgttgttgttgatgattagatgtgggagttggagttgttgttaaagatcttgatattgatcttgataatatattagatacaatatttgaagaggatttaagtgataatttgattgcatttctagcaatatgacgatgaggtgtataagtatagatcattgtttattatttaagagaatgaaaaagaaaaagaaaaaaggggaatattgggagcaaaagcaaaagcaaagtaaaaataaaacacacgccagaaaggatggatatagttggtgaaataaaaggttaggaataagaagggatatttataatagaaataaatgagcaaatatagaagtaagagtatgaatatgaatatgaataaaggagagcaaataacaagttaaaggtaaattatgaaaatatagaaatttaatcatgtatgtaatcatgtaaaaaaatgaatatcgtagaaatacggacggaacaacgcagaatacaatagaaataccaataaagttgaaactccgtactcattataataataacaatcaacaaaagaaatgatagcagaaataaaaagagagatggaaatagaaatagaaacctataataaagtcaatgaccgtttcccgttgaaatgacaggtcaatctccggaatcattacgtaatctcgcgggctttccctcctttttccattttccattttcctttttctattacgtatattttcccgttatttggtcatttactgtcttattaattgtcattagaaggtcatcacatcacatatcatatcatatcagatgtatggtacattaattgatacaatatgtgttacaatagtgggattattgataattttaattattttatataaaattattaatattgaaaaatttaatgtaaataggaaaggtttaatatggattcgtaaatcacctaatcatgtattacgtccaatacgacaatcaaattttaaaattattgaacctttaccaagtgtacttgaaaggagtatagaacatagaattaagtattaattagtatattaattatataatattattataattataattatgtatcatttatattatattataagacaaataaagaagggaaaaaaagggggtatactatactatattacatattctaactatccacgtaataattcacgtaataaacacataaatgatcttgatcttgaatttttaatgattttaccttccatactactattaacctcactatcatcatcatcaatataaacaaatgaatcaattgtgtaaagtgaacaattatcagttaaattattaatattaccttgtttatcaataattgtttcctttaaattatttgtaacccatttaccatcaactaaaaatttataaattaatggtaatttatctgttttaattgatataacaaatttatcaattttatttaaatattccatttgatgaatttttgtccattcatcaaaatctcctgctaaataaacttcatttgctttatatggcctataaattatattatatgttagtatttatatttagaatatttatatttattttttttactatactaatactaatactaatacagatacataccaagttattgtaacagtgtacattttccttcctatttgaataatctattattctaatgagataagacagacattatgataatacctgatagcagagccgccaatgaagatttatttttcagcgaaatttcactctctctcagtgaagaagttgccataaagagaagagctcctgctgttaatgatgatagtagtgtgttatgattatgagagtgtgtatgtgtatgtgtatgactgtgactatgactgtgattatgattattactctcattagttaaaagatttgatgataatgatccaattaaaacacctgatgatgctaataatgtgaaaaatattgatttaaatttcccattacctgattgtacccttaatgcataatctccaactgaatgtggtattgaatgtaataatgttgcaattgcagttgatactccaactgaatgtgatgttgcaaatgctcctgataatgctaatccatcagttacattatgtgcaaaatctgaaattaatgctaaattattatgatgtgaatgtcctttatgattatgagcattcacctatgatcatgattatgattatgattatgtccttcaccacttattatggaaaagatcaaaaatccaacttaatataattaatccttgattataattattttcaccattattattactattttcaaaacattcaggtaacatatgtaaaaatacatcacctaataatgcaccaactgcaaatgatgcagctggtttcattataattggacttgctaattttggtattataattaataaaaataatgcaattgaaggtccaataattgaataaattgcacctaataatgcattctctgatgatgttaatgggaatgcactaattgaaataaattgaattatatcacttaaatcaaatacattatatgataatctattaactgcaaatacttgatccattttctgttactttataaagaatataatatatatataagcttaagttattagaaaaagacttgagtgcatgtccaaaaaccattagaaactgtctcagaataaatttaacagtctcaaagtctctcataatagtaattttcaaatttatataccctatttcttacttcttatttctttttatctacttttatctacttttatcttcttattttatccactgattatatactcaaataatgcctgcccttgcaactcatacggaggatgggcggattatgttgaagatttctttaaatcaaaattcaaattcagattcaaattcagatttaaattcaaattcaaatataccaccaacttcacctgatttatctgatatttcattatctgatattgaaaatgctgtaattacaactgaaaaattatcaaatcgaatatcaaaaattaaaactaataaatcatttattatttcaatgaagttaccaaaggataaactgatgaaaagtttaactccaataaatttacctccaattttccaacctcaagaactgcaatctcatataactccatcaaataaacctccacaattacaacctcatttattaccaactttacaatctctcttacctccaactttccaacctcgacctgatacaaattcatctgttgagacacaacttcaatcacatattcaacctcaacctcaaccccaacatgaagctcaacctcaacatcaatctcaacatcaacctgaagcagctcaggctcaggatcagccacaggcacaacttttaccatcaccaacatttcaacctaaatctcaaccagaattccaaccatcagataaatctcaacaaacaaatgaatcacaaccacctttaccaccaccagtacgagctccaacacctccaacttctcaaccttctttcttagaaactactccaaagggtaaaaagaaacgacctaaaccattatattcaagattaatgattagatacaatgtaccatttataaatcctactaataatgcagaagaagataatgatgatgaagatcttatagaaaaatattttaaactatcattaaaggatccattaactggttcaagaattcaaatacctattagatcaagattttgttcacatgctgaatgttttgattatattacatttctttcattatataatttaagaccatttcgaatacatttaagaagacaaatatcaaatttacctcctggtccattaggtgtttcaagtgataatattaaaccagttgttttatcagttttaaatgatacaaagaggccatttttagaagctaaaaagcataattttaatacatcatcatttgaatataaaaataaaatgaaaaattttaaatattatcataaaccattaaatgatttagaatggttttgttgtccaatttgtaatttagaatttaatattaaaaaattaggtgatatttatgttgttggtgaattaattgatttattattagatgttaatgatttatcatttaatattttacaaattgatttatcaaatggtgaaactaaatggattaatgatgatgaagaggaagcaaagcctataaaggaaacagaaattcaaactatagatttagatgatgaagatgaagattatgatgataatattattaatactaataataacacgaatgcaaatacaaatattaatatgacaattccaaaatcaattataatacccacagatagttcaactcctacaactggagttgatgaagaagctcaaatgttagaagaaatagatgcattatttgatgaattaccaccatcaccagattctcaatcaccaattagacaaaatcaaatacccacaacattaccaatttctaaacatattcaaccttatccaccaaatgttcctgttttcatgccaatttccaattattcaggggtagttgcatttcgtccaacaccttttacaccagatactcaacaacaggaaccatgtattcatgagtggagagggtgtaccggatgatcccatagtgttagattagcagacttaaaagtatgtaagattaatgtagtacgtaatataattaaaataggtaagcgacttttttataatcttcaaatcagcaatcaccctccatcaccccaggtcttcatcttcatcatctcgtgtttttatatagtatatcatacaggatataggataataaagcatagtttcatatactctaatagatggatagagatatttacccgcctggaactcaattaactgttggttcacatttaatttcaattattaaatattttagtaagggtggctttgcacaagtttatacatgttcaataacaccaaaatggaataataaatcgattgtttgtttaaagagggttaaagtacctgataaaccttcattaaatattttacgtaaagaagttgatgcaatgagaaaattacaaggtcatgattgtattgtttcatatattgattctcatgcaactagatcaaataatggtataggaccaggttatgaagttttcatgttaatggaatattgttcaaataaaggtttaattgattttatgaatacaagattagttaataaattaaatgaaaatgaaattttaaatataatggaacaaattactcatgcagttgcatttatgcattcattaaatcctccattaattcatagagatattaaaattgaaaatgttttaattgatgaaaattttaaatttaaattatgtgattttggttcatgtttcaacaattataaatccacctaaaaatattgaagaatttaaatcaattcaagatgatataatgcaaaatacaacacctcaatatagatgtcctgaaatgttagatttatatagtggtaaaaaaattgatgaaaaatcagatatttgggcattaggtgttttcctttataaattatgtttttatacaacaccatttgaatcaaattcaattaatggtaattttaatggtgattatgcaattatgaaaggaatttataaaattccaaatataccaatttatagtgaaagattgaaaaatgttataatgaaattgttaatggttgatccaaatttaagaccaaatgttttccaattattagatgaaatacgtaaaatgagaggtaaaaatccaattcatatggaagttaaggtaccaccaaagactaattatttaacagttccaatgcagcaacaacaaattaataactcagttacaggctttaataatatggtttcatcgtcatcatcatctaaatcatcccaattacatccatcgggaaattcaaatacaagtttattcaaatataatgaactgaaaaagtcaattacgaatacaatagaggataaaattccaaactgatcaaaatacaattcattcattatcaccgactaaattaagaaataaaaatagaccattatcagtatatgaaaagaaaactgatgatattaataatataacaagttcgatggattttatcaaggcaatatcgagagagaatacatcatcaggtaattcaagacaaacttcaagatcaaagaaacgttcaagtattacatcacttaaaaatcttttaacaggtggatctatgaaaggtagtagtagtagtaattataattataacaataataatggtagtagcagtagtagcagtagtagtagtagtagtggaagcaatgaaagttatagtaagagaagtattagtaatgaattacttaataatacattgggtgatttacaggagatgtcaccagaaactaagaaaccacaaagttttgaaataaataaattaccaaaacctatttcaattgaaattataccaactattaaacgtacaaattctattcagaatagagttaaaacattatttagaaatacttcaccaccaacaattaaaacagctcaaggttatggtaaatatactgaggaacaattaaaaaaatcaatttcaactaaaaagccattaccacctccaaaacctaaaaagccagatcatttgaaaactttagataataatgaacttagaaaatttgaacttaaatatcctggaactgtttaattttaattctataaaaattattaatacatttatttatttgttatttattatttgattatctatctacttaattagtatggtttaaaccttttactagatttagttgatgatttactttttttcaatgatttcttaagtcttttacgttcttctttatctttctttttcttatccttttcagatttagttacttcatcattgttagtatcattatcattaatatcataaaaagtgaaattatcttgtgtattttgtaatccttccattgcccaagcacatattttactatcttcaccagcggtaaatactgtattatttataatacttatatcacgtacaatatcatcaccatgaccaccttgtaaattccaacatttagaaggattgaaattttcattttgggcatcaaattcaaataatttaacaatattttcagaatttgaaccacatgcaacataacctggtgcatataaatcaattacatattcacaattccatttttctctaatatcaccaaaatctttatcaccacgtttgttgctttgaatattgttattattaatttcaggatctaaatcattttctgtacttaaatcgaaaataccaaaagtttccatatgtgataaaacataaattctatttgatgataaaaaattagctgaatgaacactagcaaaattaatacattgtaattgagcatcatcctcaatttctatattaatatcataaatattaacataattatcagttgcacctgataataaaatatttttccttaaaggatgaaatttaacatcagttatatcatcattatgagaatcaataaatgatcttaaaggtttatctaatttacgttcatcccaaagaattaattctgaatctgtaccctttaattgactacctgatgcaattaatccatgatttacatcaagactataaaatggtaaattacgtgaattattcaaaatgtgaattggtttaaattcaattcttgaatcccataatttaactgttgaatcttctgaacatgaaattaaaatatttgaattatttggatttgattttaatttatgaattggaccattatgtgcattaaatgatgaaattgatgaccatttcaatggatctgttgataatgaatgaatttgtccgttagatgatgaagcatatatggaagatgtatttgttgaacataatgataatatccagtcaggtaatgttattgattgcattgttcatatacaaaagaaggaaggtaaataatatttatttagtaagaaaaaaaaatttggtgttttttcatgtaacctccataaatctgtttctgattgtttatattaatttaattactttatttcttctcttatttctgtaaagcaatgtcaagtattaataaatcaggtaagagattcactcctaaactcacccaaagaggtaggaaaggattagttacaccacaatcttcacaagtaaccactacaagtcaaagggatatttcaccaacaagagtagtttcaccatcaccaccaatatcaccagtttcacaaaaaactgtagctactccaacaacaacaacaacaacaacaacaacacctgctttgagaacggcatcattatcatcaagtataccaataactaataatactaataaaataagaactgcatcattatcaacaaataatactaatacatcaacaacatcattacgtcgtccaagttatcaatttactgcacctacaccaaattcaagaactggaggtaggaaaagattaaattcattatcatctaatactatgcctagaagagcatcattatcattagttgcaagaagagagagtcaaagtctaggacaaggacaaggacaaggacaagatcaaataccaatacagacacaacaagaagttaagaaaatacctattgtttctaaaaaagtaaatgtaccaattattatcaaacaaagggaaaaagaggaaagtaaagttaaaatacctattaaagatactgagatagatccacttgttaaacctgatattgaaccaaaagaagtggtagatgaggtagaaaatgttgttgaaaccgtacctgagccaacacagcctattgaagcatttataacagaagctgaattagccaaaaattctaaatgggttttaaatagggagactagaaggtatgaattagttaaaattgaagatattaaggataatacaagtgcagctgagaggtatgagattgggcataaattagagaatatacttgaaattcaaaagatttttaaagatagtgattcaacacttacaagtagtattgaaatcaatgagaataagatgacaatgagagatttatgtaaaccatcattcccaattgggaaaacttctaaaaattttgaagctgcaattgcaggagaacgtaaattagcagaggaaagaattaatagaagaaagatacgtgagagggctaaaaggttaagaatgagtgaagataaagttattagagttttcggagatgaaggatttgaagagatgaatgaaaaggagagattagccaaagttaaagagatgatggataaaaaggaagaagttgagaaacataatgttgttcaattacaaattagtgatggtaaattaacatataatcaagagagtacagttgttgatagacatattggtaggaatgaacaaaataaggaagttgttgaagaaaatatatttgaacatatagttacaagtgagacatatacaaagagaaaagttacgagtaaatggagtccacatgaagttgcggaattatttaaagctgttagtatatttggtacagattttgaaatgattgctaaattattcccatataggacaaggaaacaaattaaggctaaatttttattagaagagaagaagaggccacatttagttgaatttgcattattaaggaaattaccagttaattttgaagaatttagtggtaaaagtggatttaaatttaatgaattaagtgaatatgagaaagagattgagaatttaagggagaaacataatgaagaattaaaattaatggaaattgaaagggttaaagcacaaattgaggatagtggagttaataaagttaaaaagagtcgtaagactatattagcagaatttagaaagaatgaagaagttgttggtacaattgattaattgatgtataaagtgtataataaagtgtatttaaagatataaaataaagatccagtaagatcaatgaaaaatttaaaataatatttcgcatattaatttatatccatgtcttttactataggggtataggataggatagtatagtagtatatataatgttagagattgataaatctagtgatgataagtatgttaagtttacagtacgaaagaaggtaaataattggaaatattttaagataattataatgataatgatgttaatgggtaataatatgattatatcggatattattagtgaatatattgaacattatagtgatattaatattaaaatggtaattaatataatcattatagggatgattataaagaaaattattaatagggatacaattaaagaggaaaaactattaattatcccaacattaggtattcaaattgaagatttaagaggtaataagaaatttataccaagggagaatatcaaggatattgtaattaatgaaggatttaaaggtaataaagttatttattatatgtgtgttattaatagggataatactaatagtaataataataataataataataataataataataataataataataataataataataataataataataatattgaagttgtattccccaatatattaccaagtataagtatattagaggaagtgtatagagatacaaggaaatacatatcagatatcagatgatgatacgtaatgaccgaaagaggtaataatcatatagtaaataaatagtaaataaataataatattagcaaatgaaacaaaagcagtgcgaaaaatggaatttgtaagagaaattctcaaatggaaaaatttgctataaaaccactcgcttttcccacttttttcattgtttactattttactgtgtgttttggatgtattttgtatgctcttttgaatcttttgaatcttttgaatcttatcttttagcatagctttatttaaataaatcaaaactacactcccactttagtcattcctttaattattatttttaatttaattaaataaaagcaaattctacttattattactatcattatgttattttcatccgttgttaattcactcattattgcactttgtgcttcaaatcaagtaaatgcttcacctgttgcacatttacatcatatgcataaaagagatgttgttcatgttactgaaactgttgttgttactgttggtggtgataatacttctttagctcaagctccagctgcaactcaagcaactttagatactcaaactgaaggtactcaaactgcttatgcttatactgttacatctgctacagatgcttctactacttcagcagcagaaactaagcagcagctactacatcagcaccagctacagaagatgtcacatcatcagcaggtactaagggtattacctactcaccatacaattctgacggtacttgtaaaaatttagcacaagttaaggaagatttcgcgaaaatttccgattatggccttattagattatatggtgttgattgtaatcaagttgagaatgttatgcaagctaagggttcaaatcaaaaattattcttaggtatcttctttatggatcaaattagtcaaggtattgaacaattatctaatgctgttaaaacttatggttcttgggatgatgtttataccgtttcaattggtaatgaattagttaattctggtgaagcttcagttgaacaaattgcttcatatgtttcaactggtaaatcattattatcttcaaatggttatagtggtcctgttgtctctgttgatactcatgtcgctatcttaaataatcctgcattatgtgaatattctgattatattgctttcaatgctcatgcttattgggatggtacaattgttggttcagatgcaggtccttggttattattacaaatgcaaagagttgcaaatgcttgtaataaacatgttatgtgtgttgaatctggttggcctcatgctggtgatgcaaatggtgttgctgttgcttcaaaatctgaacaatcaaatgcaattaattcaatttcttcaacttgtggtgatgatacaatcgctttcaccgcttttgatgatatgtggaaaaatcctggttcaaaaaatgttgaacaatattggggtttattctaaattaattaaaaaaaaaacattattatattataacaatattatattttaacattatttcgttcttttttcaaataaataaattatattaccactttatcttatatcatctcatcttatcttatttctatactatcttatataactaatcaaaaaacttcgtttgattatcttctccgtgattccctttggtaatattatattatattatttatatctttcaaatacataaatcaaatcaaatatctaactattagtaatatcatagtatacaaagcgacatttcaaaaaaattcaaaaattatttttcacttagcctttacactccacttgaatcatcttaaacccaataacatacactacacagatacatacacatataatgaactcattaagattatttatacgttcatattcaacttccaatcttaacaaggcagaattacatatttatgaaaaattgaaaaatcatttatctccaacttctttagaggtaagggatatttcaggtggttgtggttcaatgtattcaattaatattataagtgaaaaatttaataatatttcaatgattaaacaacatagattagttaattcaattttaaaggatgaaattaaaacttggcatggtttacaattaaaaacaaaagcttctaataaagtataaacaatattatattatattatatgtatataaatcttataaaaattactaaattattcaataacttcttcattctcttcaattataacttctttaatagttttaactttctctaattcaatttctttccttttaataataaatttatcaagtttttcaattgttttagatctataagatttccaatcatttaataatttctttctttgtaaaattaattcccttaatgcagcatttgtatccattgtatcactctcttcaaattgtgcagcatattcttttaagtttttacgaactctctttttatcattatttgttaataatttaattggtcttggtctccataaaaattctttaaatgaattaatatgttcctcctttaaaatatgtccaacacaatcataaattgtataaccattattaattttagttttccaaaatgatgaaattgctgtaacaaatctacctgatgattcccattgaatatctgttaaacctgcaaattcattagttttcaataattttaaattagatgaaactttcttattttgttcctttgatttttcaccatcaaattcaacatcataaaattttaatttacttaaattttcatttaatgatgttaaaattacaaatctaccatttggtgaccaaattatatcatttaatgaatctgaaaaatttgttaatggaacccatttctttaatgatgaattattattaactttaacttcttcaatatcgaaaattgtaattgtattaatactacttgaagttgcaatatttgattgattattaatttcacctttatcaattttactaattgtaataaatttatttgattttggttcccatttaaaatttaaaattaaatcagttaattcaattttatcaactggtaaatctttttcagttaatttaaaaatttgtaaatttgaaaagaaagattttttggattttgtatgtcttgtaacattacaacataaatatttacctgattcattccaatttaatttaatatctttaacttgaactaatggaattgttcttaaaattgtctttgaaggaatattcataacactaacttttgcactttggttttcactttctggtgtccaatatgataaaataatatctaatggatcatctttctttgaatttgctaatttaatacctgatggtgcaaattcaaaatcaacaattccatcaattttaactaattttttatctaataattggaaatctttttcagtttcataaataccaattgcatcaggtccttgtcttgcacaatatttatcatcatatgaccatttaattaatggccatggcattctattagtattttctaaatttggtggtaatgcaaaagttttaacaggtaaaccaattgaaatatcccaaataattaattttttaccaatatcttcatctttaaatggataatcatttcttaattcaggttttaaatctaatttattcataattggttcaggtgataaagtaactaaaaatttttcatttggtgaaatatcaattaatctaacacctggatgtaaatatttatgaattctatcaaaatttgatccaccccatgattgaacaccttgtgggaacattgaaaataaatatttaccctttggtgaccatttcatataagttgaagtccattgatttctaaatggtataacaggttcattttctaaattttttctaaaccaattaattccaactgattgatcataattaattaaaaattgatctctaacattattatcaattaaccaagaatttaaataaccaatttctttaaattttggaaataaaggttcctcaaattcattagaaattttacctgataaaacaaattcttcaatatcatttaatttattaactaataatctatgtttaatatctaattttttaccattaagtgaattaactgcctttgaagcttcaattgaattagaatatctaataattaaataacctttggttttaccatcttcaattggtaaataaatatcttcaattttaccacattgtgaaaataatttatttaaaactttctttaaaactggtgctttactttcaggtgcaattggtgctccatcacaaagtacacatctatcaattaaactattttcttctttaacattatatttagattctaaatcactaaaatctaatgaacttaaatcaacactgttgacatcaaactctgcaacttcagtcattgtctatatgtctatcaccaaaagcaaaatataacaataaacactgattgaaaattttttatttataattgaaaagacatgaaaaattggaaaagttgaaaaatcgtccatttcacaaatttcattcactttcaagtcccgtcgactcaggatgtcttcttttaagtagacttgtacacttatctactgacaaatggtacaacaactgtcattggtatcacatatagatgataaacaattaaataaactattactaacattacaggcattaaccggtacaaaaccatttgaaatcaaacgtcatacaatcattttaaaaccaagaaatccatttttacctgatccaatacctggtaaaattaatcaaattgaaagttataaggcaagaataactagaatttggaatgaaaatgatggttatccattaaagggtgattcaataattaatcaaaataatggattaaatgaatcaatttggacattacaaattagtgatatacctgcaggtggtgaaaataatgttttaatacaaaatatttatgaaacaacaatttataaaactgatgatataattggttatttagaggaattaggttatatgcatgaagttgaattttgggttaaaggttggagattttattataataatataatttttgaaataagtaaattattattaattgataataataatgatgatgatattattaatgttgataatgataatgaaaatactactaatataaataacttaacaaaattaaaagattttgatgataagggagtttattctataaaggcatttgttaatataagttcatttaatgatttagagagtgttgcaattggtaaaaagaatttacttgatttaaaatctcaattacaagatttaattgatttacatatacctgatagattattaatggatagtagaattaattatacaaatcataaaattatataattatataaaattatataattatatatcaaacactactcttcatcactttcgtataatcctccatttataatatactctccatcaatatcactatcattaccttcaatatcttcaaaatcttcaaaatcttcaaaattattaaatttagtagtttgattagtttgataattatttaattgattgaaaatctttggtgaattcatttcaactggtctagtaagtatattcattaatgattgtgattgtaattgatttgtatcttgaacaataggttcaggtttcttcagtatgtttaataattgtgatgatggatcagacacaacactttctggacttttaggactattaattgaaggactctttaacatatttaataattgtaatgatggatcagtattaggagtttcaggtttctttaaaatagtaagtaagtttgctgatggatcagtatttgtagtttctggctttttcagaatatttagtaactgtgcagatggatcaacttttggtgtttctggtttttttaaaatatttaataattgtgatgatggatcaatagatttattctctggagttttgattatatttaataactgtgatgatgtagatgatggtggaggtgatgataaatcgttgccatttgttggttttttcaataaattcaataaattagcagatggatcaataggtgcagatacgggtgcagattttaattcagtttcaaattcaggttttttcaatatatttaataattgactagatgaatcattatttgattgttgtaaatgaattggagtttcaggttttttcaaaatatttaataattgtgcagatgggtcattatttttactatcatttggttctgttaagaaacttaatgaatcaactgaaatattatcttgagttcttggttttaaagttttaaaactaggttctgttgattctatttctttttcgatttgttcaggttcatcattttttccattatcattttcattagttttttgattattcataaattcattaatatttgattttttcagtaataaaattggtttaccattagaaatatttgatctaattgatgatgaagttgttgaattagcaggttgtgtaatatctaatggaatttccttttcaattggtttagtaattgattctttaattgattctttgattatttttggttctaatttattttcaattggtttttcacgtttaagtattctaattggagtatttgatgatgataaggatgaagatggtggtgataatgatgatgatgattgagaagttgttggatttttcaaaagatttaataaatcagcacttttattattattattagtattattattattattattatcttttggtgaagatgaaggttttaattttaaaatattcaacaattctttactattttcaggatttaattttttatgagacattgaaaattgaggttttgcaaatgttgaagcagatggtgaatttgtcatatttggtgcaattaaactattttgttgtaataattgaggtaatggttgaatgttattattattattattgtgattagattgtaaatgaggtaaatgattaatatttaattgattagcaaatggtgaaaaatatgggttaaacatttgtaatgggaaatgagcatgttgattatttgggaatggaggttgttgagtaaatctattttgtaataaatgaggtggtaataaatgataaggtaatgaaggattaagtgttctatattgttgttgatataacatttgttgttgttgttgaagaatagggttattgatttgttgattaatattattattagtatcattagaagaaacatttgaatctgaagttgtaggtaaattatcagttgaatccttttgaggtttagttgcagatttaagtattgctaataattctctacccggatcattaatttgatcattatttgtagtattgtctgtaacttcattaacaatattattattattattagtagtagtagtggtagtattagaattattactatcattttcaattgaataaccatctaaacctaaaattttctttaattgaatagttgctaattgttttaatttttcatcagattcattattctttattcttttaatataagaactaatttgttttaacattgcaccaactaaataaaaattacttgtatttttagttgctttatttaaatatttaatatccatccattgaatatcaacaatttcatatctaacttttggtataaatttaatattatcaggtacatttttaataatataaattttataatttttacccttaattgttctttcaacgaaaatttcttcatcaattaaatttgaagcatcaaaacctgtttcttcctctaattctcttaatgcacaatctaaatcagattcatcttttgaaattttacctcttgggaatccccaacttgaactttcaatacctttaactaataatattttatctaatgaattatttaataaacaacaacctctaacaggtatagttgatttatatttaccaaataatgttaaagcattatttggatctccccatttccaaataagtggacattgatcaattaatttatttgtaaattgtttcattttcattgaaggtaaaagaggatttaaagttctaaggaaatcttgataaaaccaatgagcttcctcaatttgaaataaaactctttcaattgaagataaatcttcctctggacaattaacgataaatctaactaataaatcttccaaacatctctccaaagattcattaacaaacccttcctttaatgggattgacattgtattctatgtgttgtatataatataatataataagctgtgtgtgctatactgaaagaaggtataattacaataccaataataaaataaggacagataccaataatcgacgttgataatatttcatcatatataataagtgaatgtctcatatagtgaaaatttacaacttcgcgggttttcacttttaacaaagtggtattcttatattatattctaattaaaaatattacagttatagatcaagaattaaatttgtatagttagttatattatgtatgtatgtgtttatgtttatatttatatttattaacagcttcttctatctctccaaacatctctctcatttctgtagaatcaagttgtttatcaaagagatatttgatacaactttcaagatcatcacatttttcttggtgtttaagttgatacgtattaccaggaataacttcttcttcatcttcatctttttcgtaatttaattcatcatcactgtttttatcatcttgaatatcttcattactttggtcattaatttctaattcgtattcatcatcattgatttcaataacatcttcattttcttcctctggaaatctatacttcatcaattttctatccatcacatgaataatctttctcatcattttcaccttcttgtttttctgattaatcgtttcatttgataatatctcattacttttatagaaatcaaacataacatgactacatggaatattaagaactcgaggaatgatacattcaacacatggtttcaacttttctattgcaaatttacttctactgaatacttttgctaaatcaacaccttctttcttattaatacattcaaaaaaattgttaaattccgaaacaaagcaactttttcctatataatcaagtttactatagtatctcatatctttaataattggatttggatttaaagattgtaacttgtcagttaacaatctttcttgtttgttgaaaaaaatttcaagtttatcaaataaattaattaaattgttctcatttttaattttattgattttcaaatcattatgggatatttcacttggttctatggttctagcaaatgattgaaactcctttgctatttcaataagattcttttgatcagtattgtcacgggaaatagaaatttcttgacaaatactgggcaaattaccttcattttcattataaataacattatcattatcatcatcaacagcattcaacaaagtattcgtaacctttataccatgcttttcgaacaccgttttcaatatgaataaaagcttgttagatttcattgcgaaaaagagagtatttttcattcatttcatcaaattcttcttgtgaattcaattttatcaccatttttcgttttttggtaagtttcagtttcgaaattctaaaatacaaagcccatcctgctcttgaaataaaaagtatgttcaattgatagatacaattttggtaaaacttaatagcttcttcaatagtttctttagtatacactacttttctccccttcatattagtagatcttttaatcatttttatatgacaggtttcaaaaaaccccatacacaacttttgcttcaattcatccaaccttttatcacacctaacaataacagaagcaaaaattctcaaaaaatttgctcttgaaaaagcatacattgcatcaataacaccaaaagtagtgaacatatcaaagtttttctccatgttcataatcttattcttaacacaatgtgtaatcctaactttgttactaaaagctcttgaagtactaataacccctgcttttgattcatcaataattacggtatctactttaagtggtcctttgtgattttcctttatcagttcaagtaacttcttgaaaaactgagtatagttagcagtatttcctcttccaggcaatgttgcaacagcgcataggataactgaactcttcttaccaatcatttccctttcaatggaaactgtgatgagtttaacattacaatcttgtagtgtacttaaagtaatatctgaactccaccatgaagcatttgcaagtgcttccaaacatttctttgatgaaaatataagtgccctttcaaaatctaatgactctgaataactgaacgagctaataacattatctttcctcatatcctactaacctaaatcgaccattcaatttacctacaacttgatcaactgctaaagctttctcaaattcatgcaaagagacgttatagtctccccagtttatccctttgaaaatatgttctgattttacatttcttctgtgagcccaagaatgaacaattttgttatctggaaagggacctatatcatcgattattcccatattttgataatatttttcttgaattgatttataggttttattatattttttgtaattatcaatagcaatattttgaaaagctctatatccaacgtttttatttctttcataacattcttcaacgtgtttacctgtgactttcattattacaacttgatgaagacaatcaataataatcgttattttccgatcacaaccatcacaagaacagaaacattccttttcaataagtgatacataacctaaaaatttttctgtaatataaggtctcttatcatctttcattttcatcaataagccacttaattcttgcatttgtgcaaaagttaaagcacagtatctccctgaagccatattatttatctgagctgcttgttcatatcttgcctttataattgaaggtggaataacgagattatgtgtgaatattgttttataagcaagcaatggatctaaagtttctgattctgatgtgaaatcgtgtctccaaattgattctatacaattgagtttatcatcatgacaatcaatacccttgattgatggagcaaatactattccaacagttgtaggatctagcacatgttttactaaatatttgatatatttagaatatggaaatccaccctcttgaataacaggataaaaagtacaacttccaatactcaagcaataatctttaaattcatcaacttgtcacaacagttgatggaatgaaatcgtagaaataattgtcatcatcaattgcatatttagagcatattatttcctttttttttatcaagtatttaaagtcaggcatgtcaggcaagtcaggcatgtcaacttgatctaaatcaaatggcatatttgcttgtttaaacagaatgggattcacagtagcattgcttgtacaaagaagattcgttcagtctgttgaaattaattattacaattctctaatttaaaatgtcttcacattatgtaagcagttttcaaaaattgcacttatacttgctgattctgctcaatgtgaattagtatttaaaataatttattaggaaggatcaatgtaaatgatgatgtttgtgcctttggtggacagattagaatattagtggagtattgtgttgcatttcgctgatttgattggtttttgataaatttgaatatgtggatggtgatattacattcattaataacatgtctaattggcttcccattgaatggaaggccacatagacagctactataaaattgttgttttttaacgaaatgcaccacaatactctactaatattctaatctgtcctccaaagtcaaaaacatcatcatttacatttatcaacaatttcattaaatttcttgtctattgtcatagggtagcttatgccaagagacctgaaatattacaatgggaaaatgagaatattatagaagatacttactgggatttcaaataccggtaaggcttccatcttattcttaggtttccacacttcacacttttcttttacaaactaatcacacataataattaacaatttaaccatttattacagttctttttcaaaacaaagcttaaactacaagctctatcagttcatttacccagtcaacttctgtattactataaatttataaaagatactataattatttttctctaaaataaatgctatataataaaacatttagtccggttaagggaaagaacaatcctataaaacccttttgttatttttttttttttatttacattaatttcattaaaatatacaattttatacagattgattacttatacgcatatattattcatgcttcatcaattcaatatatcttcatatactgaactaaatgtaaattatttctgtttgattattctcaatctttttcatctaaattagatctaataagaactaaatttttcatatttgaatagcaaatatgtatctttaatatatctttttgttatcctaaactctggatcattcttattgcttttgtagcattgtttgttaaaaaatataattaacttgattattatatttgctttataagcatctttctttataagtcatgtgactccaccaccaccggggtaacaaaacacttaagaaaaacaacaaattccttgttagctcagtcggtagagcgttcggcttttaagaattctactaagaagtcgaccgaaatgtccagggttcgagcccctgataaggagtttaaacattttttttttcaatgtctgtctgatctatcgatattaatggaaagaagtatattttgatttaaagtaatggataatatacttggtttcattttcttttttcttcaataaacataaaatatttgatacaagatgatgcccggaggaggagggaaatttcaagttgaagttgatccaactgaagatactgaatggaatgatattttacgagataaaggtattataccaccaaaggaaagtgatggtaaggaagaattagaggaaatgattgatgaagcaattaaatccaattatgaaaatagattagaagataaagatttagatgaattagaggaacttgaaggattagaggatgatgatttccttgagatgtataaaaataagagaatcaatgaaatgaaaaatttacagaaaaataatgataaattatttggtcaagtaattgaaattagcaaacctgattggaatgttgaaattactgaagcaagtgaaaaatatacagttttcgttcatttaaagaatgaatcaattttacaatcaagattattaagtttaattttaaggaaagtttcaaatgattataaaaatattaaatttgttgaaattgaaagtaagagagcaattgaaaattatcctgataataattgtccaactatattaatttataaaaatggtgaattaattaaacaattagttactttattaatgttaaatggtaatgatactaaaagtaatgatattgttaaattattagttgatttaaaatgtattgatgaaaaggtatatgaaaaaaatagagaattagaattagaagacgaatttaataataatgataataataatgactcagatgaatcagatgatgatgatttctttaattaattaattaaccatacaataaaataacatataaccattaacttttttaataaaagattcagaaactcttgtaacatttgcatcatcaaatttaaaccataaaccattattatttttaacataagctaaataatgacctgtattaacattaccaatatgacaaataattgaaaataattcataattaataattgtttcattatttgataaataatcatttatatttaaaattaatggtatatcaatatgatgatctaattttgaacttataccaaaatgtttaaaccttttcaattgaattgataaaattttaggtaatttatttaattttaaatttttagtaacttttgtacgtttttcacaataattacaataatataattcatcaagtaattcaatatttgtaaatttttttaaacaatcatttaaatttgttaaattattattatttaaatcttgaatttctaatgataaatctaacattggatcaattatttctctaaatttaccacaaactgtacattttaaagttgattttaaagtacctgaaaaagttttatgaataatacattgacaattatttgaatgattatgttgtaaatttgttgttgaaggtgaaggtgaaattgatgttgaagatgatgatgatgtattgttggtgttattattattagcattgttttctatatttttatttattaaatcatttttagaatttttatgaatttgatgaattaaaaattgccaaaattcatgagcatcttgttctgtataaccagctaatgattttttaattttccaagaattttcaattaaatttgtaataccgaatggtataattgaaggatttgtgaaaaaatcttgaaaaattaaatttaatgaacaagataaacaattttcaatattacaattaatatgattatgataaccatttaaataataattccttataaaaggattatgtataattgattgtaaaattgatgacataaagcaagttgcacctaaattaatgaaaccttttaatgaattaaattctttaaatgatggtaatcttgaattttcattaattagttttaaattatttgataatgaattataatttaataattgatgataaattggtatatcacatttataacaaaataatataccatttgatgaattaattgcaaatatatgatttgaagattttgcatgttgaaatgaatgatttttagattgaatatgattataacaaccaacaaatgaacattgtaaacacatataagttattgatgaatgacaattaggatgtgagcatttcagtacttcccaacgtattcgacgtagtttatcatctttcttattatcattattatcattattatcactagtattactataatgaacgattttcaatgcagttgaataagttttcagtactgtatctctggattttgattccagtactttgttaatatgaggacatgacattatatactgtgtatactattctataaacgctaaaaagagagagagatctgttaaagaacaaagtttcattatagaatattattgtatatcagatcaaatttattttaatcactattaagtaatataatagtagaattttcatggggagcgctactgggagtgcccattggagagttccccagtggagatggaatagagggagtagtagatgacatagtagatggcatattcttaaatgaagtatcacaacagacaacaagaagagatgatgtaccttccaaatgaacagtatcaactattgattgtaatggggatgtagttatattatcccatttacgtagacgtcgtcgagttgataaatcccaaagacatatactattttgaccacctgataatagtttacccttaccgaaaggtattaaagtaccaacaggaccagctaatggtggattatttgaacttctatgagctctgaaaatatatttatccatttgaatattagtaattttattattagttacaattggagcacctaatgcagcagttgttaaagtaactgttggttcacccattattgaagaagataattgaaatttaccaacagcaattttaccttctaacccaccacaggcccaataaatttcatcatttaatgattcattataaattatagttaatgaagttataattggtattttaaatccacttgaaccattccaaattttttcataaataccatttttaccattaatccaaagactaattataccatcaattgttgaaataataacaatttcaatattatcatttataattgaaattgatactttttgtatacagttatcaccaccacctgtacctgtattaaattcattcaatatttcccaacctggtaatgccattatttgtactttcccatttaaataaccaataattgccgttgaatcatcatttgaagttgcaattgatgaaataatatcatcatcattataattactctctttcaatacaattaaatccaaattcatatcctttatattccttgtatcaattttaatacgtaatattgtaccattatataatatgataatacaaccacattcaaatccactattaattaatccaatagttgtagattgtaaatctttacaaattaggagattaccagatgataattcaaatacaccaatccatccattgattgtactcactactacatattctccatacactacagtgcccgtaacataccctggaatgtccctaattatcatcattcaccacaaagatgaagaacaagtggtaattataatactttaataaacaaagtgaaaaataaaaaatttgaaattcggcgatatccgcttaataagagagataagctttatcttccattaccaatttcttcttttatttcttctttcttatttaaagagtgtactttcctcttttctggtctggtaagctttgcagatactaacatacaatgtacttctttgaagcaaccgagaggaaaagatatgcacaggttgcatgtgcagttatttggtgtttattcggtgcaggtccaattttcggttttgctgccttaaaaccaactcttatcgatcaaggtgtttatgcaaatgtttgtaatattaatagtaatagtactaatatcgatgatatcaatatatcatctacaatggtatttttatctaaaatttatccaattcattcaaatacattatctaattgtattgaacaagatttaaaattaaatatgatgtttacagttggtgcagctttaactaatgtttcagctttaattattggttcaactttagatttttatggtccaagaatttgtggtttaattggtgcatttttccttttattagcatcaattattttcatttattcatcatcaattgaaatttttgatccttatttaattggttattcattaatggcattaggtggtccattttcatatatttcatcatttcaattaagtaatgcattccctgaaaaatctggtttaattttagctttattaacaggtgctttcgatacatcatcagcaattttcttaatttataataaattatacaattataattcaaattttttcactttaatgaatttttacaaaatttatttaattgtaccaattttcattataattgttcaattaactattatgccaaatgaatcatatttaactccaccacctgaattaattccaaatccaacagatgaacaaagagctttatcaattgctgcagcaaatgaaaatttaattcatagtactacaagtaataatggtgaagagggtgaagaagatgagcaaattaatgaagtacaaccattattaatgagaagacgttcatcacttggtgatgcatataaatctacatatattgaagaagaaattgaagaattaacaaaatctaaaacagaattttcatattcaattttcggtatacttcatggtaaatcagctgaatatcaatttaaatcatggtggtttatacttatttgtttatttgcaacaattcaaatgttaagattaaattattttgttgcaacaattaattcacaatatgtttatttattaaaatcaaataaattagcagattcattaaataaaattttcgatattgcattaccattaggtggtataatttcaattccatttgttggtattttcttagataatttttcaacttatattgtaatgattatacttttaattatttcattaattattggaattttaggtataattgaaaattcatttatttcaggtgttataaatgttttaatatttgtttgttatagaccatttttttatacatcaatttcagattattgtgcaaaagttttcggatttgaaacttttggtttaatttatggttcaattatgacttgttcaggtattttcaattttttacaatcattattagataatttaactcatacaaaatttaatatgaatccaattccattaaatttattattaataattataactttaataattggattatcaacagttacctatattaccattcaaacaagaaactatgcaactcaaagattccaatcagctaataactcaaattaactatataactctttctctatataattatataaaaaccctattaaaaccctgttactcaaattatcgcgtatattattaaagtcttttacgttggagagttttttacttcacttactgctatactacttcttatttctttcactaaagcaagacctcttcgaagatcccctcatcgatccaaatggtgttaggattcaaagcgaggtcaagataaatgatagtctttataattattatattaatatattgactttccttgaattctttaaataaactaatttcgtttatggtttaagttaattcattgatacaatttatatacaacaatactaatactaatctaaatcagtaatatttcttaaattcataactctttcaggttccattgaatcaataaaatcttttaattctaatggtcttaaagtaatttcattattaaaattattctccttttctctatcattaattatatttttacgtataaattctcttgttgaattaattgcagcatttctacataattcctttaaatcagatccacttaaaccattggtaattggaactaattcatttaattggaaattaattttaatatcttttaataatttttctaaaattaataatctttgttcatcattgggtaatttaatattaaatttttttggcatacgtcttaaaaatgctgaatcaatatcatttggtctatttgttgcacctaaaattaaaattctaccactattaattaaaccatcccataatgtcataaattctgcctttaaagttgcagttacttcatgatcatttgaattacgttcccttaaaaatgaatcaatttcatcaataaatataatacatggttgtaatttatttgctaatgaaaataatgcatcaattaatttattactctctccaaaccatttatccataattgttgacattctaatacttataaaattagatttactctcctttgctaatgctttagctaacattgttttaccacatcctggtggtccataaagtaatacaccctttggtgctgataataatgaaccatattgtttaaataaatttggataaactaatggtaatataacactctcttgtaaatcatttataatttcatttaatcctccaatatcttgaaatgatgtatcaatctcttctggtgttattaaatatgctaataaaattttttcataatttgataatgaattgattatattatttaattcaggtgattgtttctttaaatttgaaatatgtttatttgtacgttccttttcatcattatttctatgatttggatcatttagaaatgttgataaaatataataaactgaaaacgatgcagttgataataatacacattcacttaataacttaaatacttcttgtttattcataatagattactagttagttaataaagagtctccatagaaagaatctacagtcaattccccatagtaatatcatcaaatatcatatattaaatttcatgttacctaatttgaaaaaattataaaaaatttcattacttaatcattgatcttctatagaagaataactccaattatcataaattgattggactttacatactttaccatttaattgatatctactaataattactgaatgaccacctaaatttaaataagttaatttaggtaatttttcagcaattattaatataattggtaaaagtaaatcaaaataaattttcaaatttaatgaatttaaaattaatgaattaattgaaatttcattaactttaattattggtttataatttaaattaattgttgaattattttcaaaattaataaatcttgaataaaggcaacgtataattaatgcaactttacgttgatttgattcattaattattttttgataatttaaatttatattttcaccttctttaataaatggtaaccaattgaaaaggaaatcaggtattgttaattcaattaaattttggaaattaaataatttattgaaaatttcttgtttcctattaaggtattcatctgttaaaacaaatttattatatgaattaataccttctttaactggttcaacaagtgttataaaattatttaaacaaattgtaagtgattttagggaaggtatattattgttcctattattaatattttggaataaatttaaattattaattaatgcaaaacataaatttgaatcatcgaaaatttcatttttgaaaatattatcagttaacatattatgattatttaaattaattattgaaatttcctctaaaagtgaataattttcaataattttattcaatttattaataaaattaatattattattaatattaattatattaaaatttgaaatattttgatatgaggttctcttaaatttaatttctaatgattttaatgatgataaaattgagaaattttgtaaaattgaaattaaattattaatttcataattattatcagatattgctaatgataatgattttaagttaggtaagttgattatgttattattattattattgaaatatgaattaaatattgataatgattgaaaattagttattttaagtgaaattaaattattcaataattgagaaggtaatgaaggtaatgatggataatttgataaatttgataaattatgatttatggaggttaaatttgaaattgaattagattttttaatattaaattctaaatattttaaatttaaggattgatgatgattattattttgaataaatgaattaaataaataaatatcatcaaatgagaataattgaattgaaattaaatttgataaaatattaaaagaggtaggatattgttttatatcgttataatagttattattattattattattataatcataatcatcaataaaatcaatttgatcattttcataaattaaattatgatgaatatgagggttggtattaataatatgaatattattgttgtcaatattgatattatcattattattatcaaataatgagataaaggaatcaatttgaaaattaaaattaataaaattaacattttttccacaaatttttaaaattttcttaatattgttaataatattatcattattatcaatagtaatattattaaatgaatcaaattgaattttattaataaattgaataatttgaggattaattgataataaatcaacaaatgaagttatatttgtataaggtatgaaagttatttcattgaaaatattattattaatcaattgactggtattattatagaaatagatgttattgaaaattttaaaatttgaataataattaagatatttacaagataattttaaattaataatggattgagtatttaaattattgtaaattatgtcaattatattatcaggtaaatctaataagttcattgttgttaaaaagaaggagatttaagaaaagaaagaagtgtatataaaaaataaattctgtggtggcttttataattataataataagtccttatttgaaatacacatgtgtgtgtcaaatcaatgatctatataattttgacacattttaattattttaattatttctatttttaaaaaatgtgggggaagagaaaaaaggggattaatttcatattacgtaatgctattttatttgattacgtaagagtcacgtgacttattcttatcaccgaagatttgtcggaggtaaggagttaaaggaatttgcaccggatttaaggattttaagaaattttaattttaattttaattttcatgaataatatattaataattaatctctgatagtagaggcttagaactttttctttgatttgatttgatttgatttctcttatttaaataatgaataataacaatacagtatccactaaaccttcaaaagcttgtgatgcttgtaggaagaggaaaatcaaatgtgaattatcagatgataataatattatctgtatcagatgtaatttgaaaaatattcaatgtacttataattatgtttataaaaaaagagagaggaaaattattgataataaaaataatatagatatagatactaatccaaagaagaaaagaggtagaccaaggaaagataataatcctatatcaaatgattatttattacaaccaaatttaaatcaaaatgatatttattataaattaaatgaatcttcaattttacttaataaaattttaaatgattctcaaattgataataatattaatatcaataatattaataataataatattaacaataatattaataataataataataataataataataataataataataataataataatattaacaataatattaacaatacccaatataatcctttacaaaatgttgaagatagacttagtaaaatggaatcattaattaatttattaattcgaaaaatcatcaccaaatttaatacaaccaaatccattatcaaattcttcaccttataactcaataaatactacctattcaaaataataatatgattactactactgctaataataataatagataataacacaacaataataatctagatgataattatttaaaattacataaatgtgaaggtttatttatgcatacatcacttttctttctttcaactcctggtataaatattttagaatcaaaaattaatgataaaaatgctttaaaacctttaacaaaatttttacaatttagttcaatttatgaaaaaaatacttataaaaaattggattgaaaccaattaatgaaaataatttaactcctttaccaaatagagatttaattaatttattaattgaaaattttaccttttgtgccttactttatggtataattaatattgataatttgaaaaatttattaaattcttattgtgattttagagatggtattttaaataatgaaaatggaccaaatttctctaattcagattattttttaatgaatacttcattattaattggttgtttattaattaatcctgattttaaataataataataataataataataataattcaactttaaattttgaaattattgaagaaaatttattaaaaaattcaattttttattatcataaaatttcaattatttcaaatgatttaaattcaattattggttgtttattattatcaatttatgctgatactatatcaatttcaaaggcaacttatttaatttcaagtactgctataagattagctcaacaattaggtttacatttagaagaatcttatagaggtttatcaactaaagatagaaatttaagattaaatatttggtggttttgttatgcatttgataaagatatttgttcaagatggggtcaagcagctgttattaatgataatgatatttcaactccatttttaccaggttttgaaagtttttattcaccaaatcttgatattaataataataaaaataaaagaatagtcataacaatcataatcataataatcataatagtaatgctcctagtaataatcaaaaaacaactaaaagatcattaattggatttgaaattctcaacgttttggatccaatgattgataattttgaagattgtaaaaatttagaacaatttgttacagttgattttgcatttataatttcaaaagtttataataattttcttagtgcaaattcaatgaaaaatttatcattaattgaaattaaggaaagattaaatgaaattttaaatgaaattgaaaattggagaaataatataccaaaaaaattaagacctgataattcatctaataattctgaatttaatgaaaatattgaaattttgaaaactaaaaatgataaattttcaaaatataaaattatgattgtacttgaatttaatgttaaatatcatcatattaaattaatggttttcatagcttatttcaaaatattgttatttagaagtttgataaagaatgtattgaaagggaaatttatttaaatccaataattatcaggctagatgtattttaaaaatgtcatgtattgttgattcaagatttggtaattatgcaaattattttatattttatccattcaatgcatttttaacaatttgttcatcatatatttatttagataatgaattaaatttaaataaatttgaaattattgaagattttaaattattaattgattgtgttaaattacatattgaaccatttcaaaatattcataataaattaggaagtcgatataaattagttagtttaattttaaaatcaatgttatatgcaacttataaatcatgtattgaaaaatatggtgaatttaataatgaatataaaattgatggaattgaaattttaaatgatattgatgatattgcaaaacaaattaaaaaaccaattgatttgttagattttaatataaattattttaatgaattgaaaaattataattataattcaactaaattaccatattttacaacaaataataatagctatagcaattctagcttcaaataataatgataaaactccaacagtttcatttttattatcaccagataaatttgaacttaatagcaatgtaagttctcatactgacaatgaattaaatatccaggaaaacttctttcaaaacatgatgaatatacccaactatttcatggattttaccactgattaagagcaaattgtataaaattacgtaatctttgtattgtatattataattaaagtgaaaaattaacttttttctattattttgattaaatagcaacatcaatttcttcttttaaaacaacgatgaataaagtacttacttgtgatatagatacaacgatatacgatgcaagtatattaatgaaagaaagtaaattagattatatattaattacaaataatgatgaattagaaggtattgtaacaactaaagatattggatttagtattaatttaaataataataataaattaattaaagatataatgacaaaagatccattatgtgcaattgaaggttctaaaatggaagatataattaatgtaatgattaataaaaaatttcgtcatttaccaataattaataaagatagtaaaataattaatttaattgatattagagaatgttataattattcaattaataaattagagaaattatatagtaataataaaggtattgatgaaattttagaaattggtaaaattggtaatggtaaaataagtcaatatttgaaaaatttgaaaaaattattacaaggtccaatattaaatgatgttttacataatggtaataataaagtaatttattgtaatattaatgatagtgtttatgaagttggtatgaaaatgaaagaatttaagagaactgcaattatagttaaagatgatgaaaatgataatgaaaatgttggaatatttacaacaaaagatttagttttcagagttataagtgaaaaattagatgtacataaaattaaaattggtgatgttatgactaaaagttttaaatttgcaaataaaaatatgaatattcatgatgcattagaaatgatgattaatggtaaatatttaaatttaccaattgttgatattgataatgataatgatgataacgatgataaaattattggtataattgatgttattaaactaatgagatttacattaaatcaaataaaaactttagaagaattaggtgaagatgatgaagatgaaaatgtagatatagatggtgataatgaagttcatgattatgatgaagaatatgctggtgatatttcaattgatgaaatacgagaatttgaaattactaaaaatgataatattaaaattgagaagaatatttattttaaaattgataataatggtaagaaatttgtaattaaaatgaaaataagtaaaggatttccaaggttaaaaaaagaaattttgaaaataattggtaagaaagatgttgaaattggatattatgaaagtggtgatttaattgaaattaatgatgatgaaagtttgaaaaattgtattgaaattcaagatagtaaaatgattaatattgtcattgttaaaagtagtggtgattataaaagtaataatactgatcataatgatagtgttaatgttggtatgggagttggagttggtatgggagtattaggtattggtatgtatttacttagacgtaggtgatatagtatattagaacatttagaacataatatgtgtgtaatatagtaatttattataataattaattaataataattatatacaagtaaaaataatgaatatacaatatcatcattataattataattatacagcattcttttccattgaagcagcctttttaagtaattttttataagttttcctcttttgagcttcaaatacatgtttaccgatatgaacattagtacctttaaatgaatcaattggtaaatcaattgcatttggagtaaattcagtaatatttgaatttgcaagatttggatttaaaattttaataaggtaatcattaattaattgataatttgataaatttgcaatttgataatctggaatattaattgaaaaagttttctgaattgatttaaaaatatttaatttatcattaattggtatttgaattgttgtttgaatattatttttttggaaaatttcatttaatttatcatttataattaatttataattatcattatttaataataaatttgattttggaatccatttagaaaccacaaaaccatttaaattttgtttaataatttcaggatcagtataacgaggatttttaatacctaaaattgtaacttttggagcatcatttgcaacagtatcttgaatttcaacagctttttcatttgagactggtttaatagctggagttgaagatgatttatctgtttttttgaagaaacggaaatagtcaagcacagaaggagcagctctagttgatgtgaaggtacgtacagtacgaagagacatggtatagacagttgctttcgaaaagaagaagaagtatatagctgatgatagtagtaatattattactggaaaatcatgaagtttgaaaaaaatttgactttctccaatttcagtcgcttctcttagagtctaagtctttctctattttatataggatataggataggatatataggatatttattaacggattgacattgaatatggaacatgatagtagacatgcaacgaggagacaagatgttgcaagtggatatgttttaaagactgcaacattgaatacattaaagaaaatttcacgtacaaggacattatatgttggtaaaattggaccaggtgttagtgaagaaatgatttattcaattttcaccaatgcaggtaatgttaataaagttataatgggagtatatgcacatacacatcaaccagcaggatttgcatttgttataatgaataatcataaggatgcaacaaatgctgttaaacatttaagaaagattagattagcaggtaatgcaattgatgttgatttagatgaaggatttgtagaaggtagacaatatgctagaagagagagaattattaataataataataattttagaggtaataatagaggttatagaggtggttatagagatggtagaggtggtaatagaggtggttatagagctaagagaagacgtgtgtaagtagtgtgtatattgtttgttattgattgtatattataagtgatgaatgttattaaagtataagtaacataaatttttacaacatattatttactatacaatatatatgatatcataataatataatttacatcagttaatgtatagtatatcagttaatagatcagttaatagatcagttaatagatcagttaatagatcagaaagaagttgaaagaatgaatgttataaatcttattcaacggaagtagtacagtatatggaattgaatccgaatatataaacaacaaacgtgccactaacacagcatatatgagcaaccaaggtgaatcatctatatatcgatatagaatataatcagatttattcagatataaattatgtaaaagaaatcaataaagtttcagttgtattatctacctattcatcactttaattaacgtgacactgtggtattatataatttatttattatatttataccgattttattacctaaaattggctacttataagatcttacactgtttatatagtacagtaatagtaactgtagttgatgtataatacaaatattgttactatcataaaaataataaaaataataataatacaacattcaatgtaactataagtaatggctggttttacagatttacaaacttttcttctcttatagattgctctatatgaagatatgctttataaaagtgacacattggtcactactttctctctccctctctcatatagttattacactattagtacaaagaagaagtatatatgtatgatataaaaccttattaatagacctggctattttcctattatgttgtatatttcctttcccgttaataaccggtacggtattatggtacgtttacttttttttgtgttttatttagtaaagtttagaaattataatagaaagtatacataaaaatgtaagtattgtaaagtaaagtgttgtaaagtaaagtgttgtaaagtaaagtgttgtaaagtaaagcatatgaaatcaaagtaaagtaaagtaaagtaaagaaatgaaaaattgtaggaatattatacatttttaagaattgaaatgtaagaaagcatgtgtaagtgtgggataatattaaatgaaatgaaatgtaattataataaattaaacctttaattgaccctttaattcttcaatttcaatatctttctttttacattcatcttttaaaattaaaatatattcagtaactaaatcaagaattttcgatttatttaatttctttgaattatcattatcatttcattctcaatttgatcatcatttcattccattttcattaactttattattgttattttcatgtgaaattgcctttttatgatcaatttcaaatgcaactccatcctctgacatccatggaactaatctttgtaaatttgcaatttttgaattaatattaattctatattttctttcaattttattatgtgctttacgttgaactaatgtcattggttttttaactctacttcttggtttctttgtagttgtatttgaactacctgtaggtattgatgcacttttagctttttaatttaactttagatttttcattgttattaacaattgatgaagatgatgttgtgaatgaattaatttcttgaatttgatttgatgaaagtaattcaggtgctgataataaatgattatgcggtattatttgttcatatggtgtattattctcatcttgtaatccatactgataactagatgaacctaaataataattatgttcattcattattattagtgttattattagtattattagtatcaattaatgaatttgattgtaaagttggtgataaaactgaacttgttggacttaatgataatgaattaattgtatcattaactaaattatttgaaaatttattatttgaattatagtttagttgggtattattaacattattataatattctaattgattatttgattgtaataattcaacattaaataattgattattattattattgttatgattattattatgattattatgattataattataattatttattgaatcataggaagaaattgaacttgaagcacttggaactgttgaaaatgtattattattattattattattaaaatgattatttaaatgagaatcatcattttcatgtaaatgattaacaacatcattttcaagttcagatgtccaatttggagtttgtaaatcatttaaagttccataaaatccttgtaacatattagtagacatattttattttatagtatatggtatatatattatttatattatttaattagcaatatcaattgataattgagattggttcttacttgttagataagaagatataaagaaataaataaagtaaagttaattctttaaaatatttaaataaaatttttatacaaacatgtgcctaaaaggtctctttatataggaaattcagatgaaagcaaaatgaaaaaagttgaaaaaaaataaaaaatgaaaatagaaaaaatagaaggaaagaataataaaatatcaaaacaatgaaatataataaaataaaataaagccacccattgacagaaaaaaaattaaatttaaaagtgatgatgctctatattatcttattatcttcatagtatctctattataaagacaaagagggtaaataaggatgcggccaagtggtctttttagtttgctcgtctcggcaagtgtttgttttagcttatttaaaaccgaagtgataagagtttatgttggttggctatttattgtatttactgtatattattatatactatattacattgtatggctgtttaaatcttacggagatagtgaagttaacttgtattaaggttaccataatgtcattattaaagttgataaaataataaattacctatcctatatagctaaaactgctaatagttatcttcaaagagaagctttttttataataattagtgtagttaattagtctaaaaagtataaattaatcctcaaatttgtttgtcgaatgatttcaaatgattgttctattcaactattacccaaatctaagaatgtaaaacatgaaaaaagcactaaactgtacttaaaactcttattcgatgcatttaccccaaaaaaatgccaagccctcaattacgatgtatttaacaataaccgacgggaaaaaaaattaggaaatcggagataactattgagcaaattatagaaaaaatctttttttcttagtgcaccccgtcgtaaattgcattttttggtacttttccactaagcaatttaacattttcctcaaaatctatccttttgcctaattgggtaattagatctctcggtataatatcttgccaggtgctaatctattgtttattcattttataacaattgtaactatcatccaatctatttacattcttcattcttaattttttgttaaaaccttatttatcaatggttccattaaattgaattaacagatttaatatctcatatatcttatatctcatatttttttatagtatccaatttccattatatcaacaaaatctactgtattactaaatctgagagcaaaaatacacgtttttgctaaattcttacaaaaaaggtttgttggtggaatcttacaaaacttacttgcggtatcaattataacttatttaattaacgaactgttataaatttattaagtaacgtttcaaacttcttagctgattttattaacacttccaggtaactcttactaatcaggaaaaacttcaaagttgaggctttttttctggaaaaattgtttggctgtattttttttcctaatatattaatagtaacaatctacacaataattgctttatattatatcatatacataaatactatcacagtttttttaaacatctctataaatcacttaactaattatcgtaaatgaacctctttcaccacacaattgaaacccctcactcaacaaatcaattacttgaaacgatttgacttcaacttaactctctttttttcaccttttttaaattcaaatttgaaccctttaaccaaataaaatccaattattagatttaaatctcttcttataaacttgtaaactttatgggctgagtcatactaaaggaactattgtaaaaatgattgtaaactcttcaaccgtaaatctatcctaagcccctcactggtcactggcttcgtacaaaacactccctaaaacatcgtttatcgtttcattattgttaaacacctgaaatacaatagtatctttgatgcatgattattgacttatctttacttgacttcatgaataatctgaaaagctatttacggtggtgtgaaacaagtttaaacaattctaaaaaaagaattttgaactaagttgatagttgagctgtgtgcacccaacaaaacttataaaatcaccatcaataaactaaagtaagctacttatatagactgaactgcccagtcatgtagttatttagtttaaaagtagtttaaaaatgtaaaataaaggaatatccaatttgaaacgttgtgttgaaaacaaagtagcaaaaattattggtggaaaaaaataaagcacaacgttttttttggaaacttaggaaactgaatcattaatatttttctaatgttacaagaatatgtaaaagctatatgttttagtattgatacatagtagcaatggttaaatagctaactcttgctttttgaaagaaactagggaaacaaaacaagaacaggtttgtcaacctcaactgaaaaaaaagattgttatttttgttacataaactttaatatagtttacacaatatagtttaccactagtggtaaactataatacacagaaaaaaagcataactaatagatactagctacccagtgtttataatatgctcaatttattgctgaaacaaatagcaaaagtgtgataaaagcataaattattgaaagtgtttaattaccatcaacatcattattatattccttaagcacttataagcagtcaaaaaaactgaacatgaagatgagaaggtttgaagctaccagaaatagaaaacattatacatgagtagtaatatattatatccatgtgtgtaaacatttcagaaatacacatgggtgtcaacacttcaaagttttcaataaagcactcagcaattgacaactacaaaactttcttgtacaatctacagaggaatatcatattaacaaataaaattaatatttcacaatacggggaatacactaatgaaggtgcttaactctcaatcatcattattcataatcattcaaaataatttgtttaacttattactcaatcattttctaaaagagttaattgataattgaaatagagacaactacaggatttttaacattattaacttgctaccatactgtacaaaaagaagaatctagtccagtttgaaatgttctaagatccttgagaaaaatgtgtagcagaaaaacagggaggtgattccaagtcgattttccacccataacaaattaaattcaatttacactattagatttggttttgactgagttgaatcaaacataatggctttttagtttgtcagccaaaggttatcacattacaatctaatacacattgagtatgttaatctacagaaagcacattcaattatggaaagaaaaaaccagtcaaaaagagcaacttaaaataaatctgattgttacccaaataacatgtattatagactcttgaaacaaaatacagcaatagcagcaagtacctttaaacactcaaagaagacctataataatcgattattagtagtaacgtaaagcaaaataccggcaccctcggaaaattggcaaaaagaaaaacacaaaaaaaacgctgaaaattccgaaccgttcagttttcagtaaatttttttgactgcatgttgaagatgtaaattttttgtataattttttgtgactattaaagaaatactgttttttctttagtctattttatataacagattactctattgacaaactagtcacatctaagtgtttatagtcagttttatcactcaaaaaacctataatcatgttgccaattttatcagttgtatgaaaaatatattgttcaaaaaatatttatctattacaacttcaaattttttaaaaaatattagcaataaacaattacctttaaaattagtgaataaacaaagtaataaaaaatatttttcaactattaaacttttagatacaagaaaaatggaatctttaacagcaaatttaaaaaaaatggatttagttccaccacaaaatattgaaggttcattcccagaatttaacacagttgatttatgtagaaactatattactgaaaaattatctgaattatcaggtgttgataaatcacttatttatcctgctcttgaatggtgtcaagttttagaaaagggtgatttacttttaccattaccaagattaagattaaagggtaatttagatgaaatggcaattgaatttgcagaaaaattcccacttggtggttatattgatcgtgttgttccacaaggtaaatttttacaattttactttaatacaaaatttttattaaattatgttaccaaggatgttttgactagaacaagtgaatttggttcatctccattaggtaataataaaacaattattgttgaattttcttcaccaaatattgcaaaacctttccatgcaggtcatttaagatcaactattattggtggtttcttatcaaatttacatgaaaaattaggttggaatgttgttagaatgaattatttaggtgattggggtaaacaatttggtgttttagcagttggttttagaaaatatggttctgaagcagaattagaagctaatccaattcaacatttatttgatgtttatgttaaaattaataatgatatgactgcagaaaaggaagcagcagaagcaaagggtgaaactttagatccagaaaattgtattgatggtgaagcaagagcattttttaaaggtatggaaaatggtgatgaagaagcattaaaattatggaaaaaattagagatttatcaattgaaagatatattggtacattatgcctagattaaatattaaatatgatgtttattcaggtgaatcacaagtttcaaatgatgttatgaaggaagtttcaaatactttaaaggaaaaaaatatgattactgaagatagaggtgcattattaattgattttaagaatttaggtcaaaagaaattaggtaaagttttagttcaaaagagtgatggtacatcattatatattacaagagatttaggtgcagcaattgaaagaaaggaaaaagtataattttgataaaatgatttatgttattgcatcacaacaagatttacatacaaaacaatttttcactgcattagatatgatgggtaataaatgggcaaaagatttagttcatgttaattttggtatggttttaggtatgtcaactagaaaaggtacagttgttttccttgatgatattttagaagctgttaaggctaaaatgcttgaaattatgcaaacaaatgcagaaaaatttgcacaagttgaagatcctgaaaaagttgcagatttagttggtatttcagctgttatgattcaagatatgcaagcaaagagaattaataactatgaatttggatgggatagaatgttatcatcagaaggtgatacaggaccatatttacaatatgcacattcaagattaagatcaattcaaagaaatgctaatgttccagatgaagaacttttagaagctaatttatcattagataatgtttgtggttcattagataaattaaaggaacaaaatttatcagatgaagaatttgaaaagaaatctaaattattagaatctcaattagagaaaacacaggcattagttagaattatggcatcatatccagatactttaagatatgcatcaaagaattatgaaccatcaacaattgttacatatttatttaaacttacacatcaattttcttcaacttataaagttttacgtgttataggtgaagaaagagaaattatgattgccagattagcattattctcagcagttagacaaatcttacacaatggtatgacattacttggtattaccccagttgaaagaatgtaatgatttatattttgtaaataataaataactatagttaataactaataataaacttccccataagtaacaatccccggattctgtgaagtaattccgcgattataataatatgacaaattactattagtaacaaaattattgaaatttttcatttggtctcatgatttataatgatttataatgatttataatgatttataatatagtttatgataaataaatacattagcatttcctcttgtcattcagagtcaagtgtatttactttcatatttaaaaacaaagatggttgaatttactccaatttctgaagctttagaagcttttaagaatggtgaatttcttgttgtaatggatgatgaagatagagaaaatgaaggtgatttaattattgcagctgaaaaagttgatactgcaaagatggcattcttagttaaacatagttcaggttatgtttgtgtaccattatcaacagagagagcagatgaacttagaattaccatttatgattcccagaagatgaaatgacctgatagacatggtactgcttatacaattacagttgattatgcaaatggtacaacaacaggtattagtgctcatgatagagcattaactgctaaaatgttaggtacatcaacaagtaaggcaactgattttttaagacctggacatatttgtccattaagagcaaaacctggtttattaagaactagaccaggtcatactgaagcaggtgttcatctatgtcaattagcaggtttacaaccagctgctgcaatttgtgaattagttagagatgatgatggtttaatgatgcgtttacctgattgttgggaattctcaaaaaaattcggtattaaaattattacaattaaagatttaattgcataccttgatgaaaacaatttataaacatttcaaatatatacaaatacataatacagaatacaaagtacaaaataggatatactttcaaatgtaaggtatagttgtatagtagttaatatctacggcttaccgtattttatatttcagccttatgtaatattcgctgttgcttgtagaagagatcctgaatcattaacgctatcattacttcttttgccatcgtttttatagataactagaaccacttacataaaacctaataaactagagacaatatgaatcgtttatttggaacaagtaataaaactccaaagccaacattagatgatgcaatgggtaatattgattcaagaatttcatcattagatgttaagataacgaaagttaatacagaactttcaacttatcaacaaaaattatcaaaaatgagagatggaccagcaaaatcatcaattaaacaacgtgcacttaaattattacgtcagaggaaacaattagaaactcaaagagatcaattaatgtcacaaagttggaatatatcacaagctcaaatgacaacagaaaatttgaagaatacaatgattacagttgatgttatgcgtcaaactaataaagaactacgtaaaacttatggtaaaattgatattgataaattagaggatatgcaagatgaaatgctggatttaattgatcaatcaaatgaattacaatctgctttaggtcgttcgtatgatgtacctgatgatatttcagagagtgaacttgactgcagaattagaggctttaggtgatgaattagattttaatgatggtatgacaaatgatggattagccaagttatttatcaaatcctcaacaagacttataagttaccttcatttattgaagatgaaccaactaaaactgaagaaccttcagctccagttgcagaacaacttataaattatattagactaatcctttcatcattacattaaaatcttcatatcttataaagtttttgtatattatattatattttataaaattacacattttaacaacttattttgcttcttccttcacaagaacaactggttcaacctacttctttccttttcaatgccatcatataatttcctatattagaacgtaggagtataaaaccatccaacagcgggaagatatgcacatcctttagaatctataatttcaaattcattctttaaagtattgacaaaagctctaatttctgattctttaatatatttagaaaaagtatgagtaccaagtggaacaattttaagaatatgttcacccatgaaaattgttgtaaaccaagaaactaaatctctattaattgtagataaaaagaaatatccacctggtttaacatgtgataatgctttatctaatacaattgccggataatcaacatgttctaacatttccatacatgtaactatatcatatttatttgaattagggatatcatctaatgaagttaatttatattcaagtttattacttaacattggatctaataatttatgttgatttgcaacttcaataacttcaggtgtcatatcaattccagtaactttttcaacatttggtaaacgagctaatgattcggataataatccaccaccgcatccaatatctaaacattgtaatttcatttctttatacatattccaagttgcatcatctaattctttattaatttgatttgaaatttcctttggtaaaatattttcatgattccaacctggaataaataatttttcatcatctgtctctgcatctgcattgacttttatatgagatctaacattatctgaaataaaatccattcttaaaatattcattttatgtaaaattctttgtgatccatgactatcccaccatgttgatgcaagttgttggaaatgttccttttccgattgagttatactggtgaaattggatttaccagcattgaaatgacgtgataccgtactgaatcttctaaacattgttccttaaagaaggactttctaggtagagctcccttaacatgaaaatcgaagttttacactgtacagagagggttttagaattttcttgatagttgatgctcgcgtttagtattgtttggtcttacatcgaatggattttttattccctggtagatgaacaattgtttttctttctggtggattattagataactgtgtattacatagatgaatccactattttgaaataatatctagaataagggtaatataataaatgtcagatagtgaaagtgataattcaagaagtgattcagaacctgaatttgaatcaattattgcaactagagctcgtagatctaatgcaggttcaagattacgacaacttaattcgatttagaagagacaaatgcaggtttaacaccatcaaatgaagatgatgaaaatgttaatctgctgtttcaagaagatgatgaagatgatgaatttgtagaatctaatgatgaaattaacgctgaagagaataattcctgatgatgatgcagatgatgatggaaatgacaataatatgaaaaccaaagctaaaggacgaagaaaagcccaattctaagaaggaaagtgaagtagaagaaggggatgatgatatggatgaaaatctttcagattcagatattagtgcatctgatgatgatgaatctgaaggtgaaagagaacttcaaagacaagagagattgaatagacgaaagaagaggaaagcagattctattaccccatctttgaaaaagaaacaaaaatctactacaactgttgctaaatcagttaagaaaacagatgaaagttaaacaacctaatccatctatattcgatagtgctccaatagctccaactagtagacgacattcatcaagaagtacaacactaaagaatagtatagaaacacatgaaaagatagagaaagagtttgaaagaagacaaactatagttcctgttgccaaaaaagaatacgttgagaaaacacttgaagagagacttgaggaagctaaaataaccgaacaaggagaatattttatcattaactagattttatgaacaagaagttcaaaagaaaaagaagcatagagatattgctaacttctaagaaattaaaattgaaaagatttattagattttggagtaaaggtgtttatataactccaaatgatgaaattaaagaaattagagaagaacagaaaagaatggcctgaagaagaggaaagaaagaataaaagaaaactagtatatttaagaagaaaaaatgctaaacttggtataaaaggtgaagtaacacttgaaatgttacaaacaaaggaaacatcacaacctgtaaataatacaataattccgcctattacacaatctgaaacccctatttctgacaatcaacctttggaaaacgataaagcggagaacaaggaaacaaaaactgttacgtttaatcaagatgttaaggttttcagaaaatggtaaggatgaagaaatcaggaaattatcagttgagcctgaaactaacatacaagaagaggaaatgacaccacaaagtgaaatatccattgatgagaaaccatgaagaaggagagcagcaaggaatctgagaaggatattgaggaaaaggaacctatttatgaaggaccaccacaactagtagtgaaaaactatataatatttgaagaatttgataaagtgttaacaccggaaaacatcaagacaagattattaggaaaacaatcattacttgctggtacaagaagagatccattatgtgaaccattatgtacaataaagaaagatgagacatctaatatagatttacaaaaaatcaaagataatcgtagtgaatcatttaaatcattacttaaattaccgaaattcggtgagaaagttgtacttgaagataattcagataagaataatgaaaatgatgaagatattgttagaataaatacaccagcaccagttggtattcatttacctgatggacaaaagaaaatgtgtttaatttcaggacaacctgcagtatattatgatccagcaacgggtgtaccatatgctacagttgaatcatttaaagttattaaggctattgttgaaggtgaatatcaatggttacaactagataatgggggtgttaattctagatatgctggaggtattggatgttattggactaaaaaggatcaaagacctgcaaagggagtacctgaaggattttgaatgtatattacacacgtgtataatagttaaggaaaagagataagtgcttcttttttctttttttgttaaaatttattagtatattaataaaaagtttataaatgatgaattttgttgtttaattaatcaaagctattgttattatttaatctgtgttatgtctaagttttggttcatgagcagctattaaatcaggttgaaattttaagaatacttctttttgagcaactggtaagaaatgtttcttaattgcagattttttatcagattttgtagttttaatttcaaataagaaatcagattcatcataatcatgttcaaattctggtaaaataatagtaacttcttcttcctcatcttcacttgatttaacattaacaatgaattctattttaagttcgaaaagacatctaacattaccctttctttgagtgacatcacaatcaccacttaaagattttaaacttttaacagtaaatacataatcatcttgaggaactgataaatttacaagattcttattaaaataatctgttgcccaaggaacacaatttttatcaacccagtgcctataaaaataagtatgttagtacattattccaaagaagaaaaaatataatacatgcaagcttaaatacggaacaatcaagatgattattatttaagtgaatcactatttatatttttttcattaaatcatcaaaaattaaataaattatatacataccagttgtttggattatgcacagtagccattatctataatatatattgaaacttttaaatgcagtattgggtataagaatcaagtgatgagcaagcaaagtgtgtagtgaaggacttatagaaactgaatttatagaaattcgaggaagacggaaagaaagcatctagaaaattccatgacggaagttaagttgattcattttcacagtttagacttttcattatcattcttattatcattatcgttatggtcctctttgatttgatatggtgaatgatataaataccatgagagagttgacaaaattagcccttgtctttggtgaatctaatctaggatatattaaaggaacaaatattttcagtatccatccaaagtaataaaaatggattatcctcatcttgtaaatgtaatgtgaataaaggtttattaggaatttgtaattttttatgattaatattccgttcttccattttaagttgaattttattatatactttacgtattctatccattgacagagtagcagttgataagatcatcatgaatggtattgtagtaattttcatttttgttaaataatcaaatatgagtgaacgaatataaattaatttatgattacaattattattattttggaaataattattaatatcataaaaattaaaccatatagcaaatgcaatttgattatcatttatatcatgtaattgaacattaattattttcttattcttatttaattttgggaaaataattggttcaagttctttacgtatttctaaatatttaataatagcaggagttggtaatcttatataacctgaaaggaaattataccattccattggaactgcaaatattatattgtttaatatttagatagggattgagagtgtttcggacttcacatctgaataattcttgatttgtagatatacgatgttctaaactactgataatttgacatttcctatcatttttacttataatattgatattattattagtattactattattattattactgacctttagctcttttcgcagagattggcgatgatccaatacgtgtatcagagttcattacagaattatatgattaattaatagcaaagaaagaataaaagataaaatagaagttgagcaataaagtgttagaataagtggttaaaataggtgaaattccattggaggctcatccataccagttttttttttttgaaaagtgatgagccatatgcattcagtgcctttttttattgattatcatttaggaaactgaagtatatcagctgtaactttagaacgaacttcaggtatatctgcaacgatactatgtctaccagttaggggtaagttataatttttttattattcatattttcaattgaattaagtttttcaataaaatttttacttgcttcaacatcattaacatgatcatcttcaccatgacaaattaataaaggtttatctttattaatctttgaataagtattatagttaagcaaatttctacctctaagtatgaaatctctcgtttcaacgaactgcaccatcaagacctttagtatcaccatttgataataaaaatttttgataatctggatcaccagtaatataatcaattttaattggacttttaactcttaattttttaccaccgagaaaacaaattgttctaacaactaattcaattggaaaaccaggataagtatctttatgaagagtaattaatggaccaataactgaaaatgatttaattttatttttaaatttaccatttgatgcataattaagtactaacccaccacccattgataatcccattaaatgtaatttatcaatatttaaatttttttcttttaaatcattaatattataatcaatcatatcatcaattcccttataagcataataatcattacttacacctctaatattattattaattaattttgattcaccttcaccacgttgatagaaaaagaaaaaatcataaccattaattgctaaagtttcagcaaattcattataaacgccaatatgatctctataaccatgaacgaataaaattctacctttccaattatctgatgaagctaaccatttataagttttaaagatacaatcatcaattgtaatttctccctcaatcggtttaatagttttacaaatataaggtggatctatcggtgtcattgttgtctatactatgatatattcttgctatatcgtttattctatccaatactctgcccaaaagcatccttatcaaaaccttaaggtaatgtcaaaagaccaacaaaagaccaacagcaacagacccgccggtattacgtaatagaataataaataaataaatggaaatttgaggtccgtagtagtaaagggaaaaaataaaaaaaattgaaaattctattttactatggacaggtctggtcctctctaattattaatgaattattaatgacgtggattgcgatgattatttaatattaataatctctactttctgatattgtgaatttatgatattatgatattttcacttatttcaatctattttagaggcaatacacacattcaatacacataaataatgtctgaagcaaagtatgtactatatgttcaatatatcctgaaatttcatatcatatcatatcacgaatattcatactaacaattttcataattatattattatagaggtgatttcggtttaatcgggttagcagttatgggtcaaaatttgatccttaatgcagcagatcatggttttacagttgttgcatataatagaactgtttcaaaagttgatcatttcttagaaaatgaagcaaagggtaaatcaattattggtgctcattcaattgaagatttatgttcaaaattaaagagaccaagaagaattatgttattagttaaagcaggtaatccagttgatcaatttattgatcaattattaccttatttagaaaaagatgatattattattgatggtggtaattctcatttcccagatactaatagaagatatgatgaattaaagaagaaaggtatcttattcgttggttcaggtgtctcaggtggtgaagaaggtgctagatatggtccttctttaatgccaggtggtgcaaaggaagcttggcctcatattaaagatattttccaatcaatttcagctaaagctgataatgaaccttgttgtgattgggttggtgatgcaggtgcaggtcattatgttaaaatggttcataatggtattgaatatggtgatatgcaattaatttgtgaagcttatgatttaatgaaaagagttggtggtttaactgataaagaaatttctgatgttttcgctgattggaatactggtgtcttagattctttcttaattgaaattacaagagatattttagcttataatgatactgatggtactccaattgttgaaaaaattttagatactgcaggtcaaaaaggtactggtaaatggactgcaattaatgcattagatttaggtatgccagttactttaattggtgaagcagtctttgcaagatgtttatcagctcttaaatctgaaagagaaagagcttcagaaattcttaatggtccagaaattgaaaaaatttcaactgcagagagaccacaatttattgaaaatttaaagcaagctttatatgcatcaaaaattatttcttatgctcaaggttttatgttaattagagaagctgcaaaggaatatggttgggaattaaatttcccttcaattgctcttatgtggagaggtggttgtattattagatcagttttcttaggtgaaattacttcagcttatagacaaaaccctgatttagaaaatttacttttccattcattcttccaagatgcaattcataaagctcaatcaggttggagaaaaactgttgcaactgctgttggttcaggtattccaactcctgcattttcaactgctttatcattctatgatggttatagatcaaagaaattaccagctaatttattacaagctcaaagagattatttcggtgctcatactttccaaattttaccagaatttgctgatgaaaatagaaaagttggtgattacattcacgttaactggactggtaaaggtggtaatgtctctgcatctacttacgacgcataatttaaatgaactatttataatattataataaataataatacataattagtaaaattttatatatcagttataatttttaacacgtatgagttattatgattaactttttaataaaattgcagctctagttatataattggatcaataataccaaccaatgtccatattcaaaaatattatgtaataactggaaaacgcgtcacgaaaattcactgtcgacaactttttaagcattaattcttgtgtgtattaatctaagtccttcctacttcttttactgattaatgattatttaaacaaaagaggtatatataactacacagcaaatttaaacatacgaaactgttgtttagtttcaaacctaaacacattattgaaatcaggatgtttatatgcaatgatattatcgtattctttaagaacatgaataccaaacagttcaacactattatccaacttcatccactcaaattctgcatcagattcaagcattttagaatatagaacaaattccaagttttctgaataagcctttatccaatcgtgctcaatatttactctttgaaatttcattaacaatttagaacaattgttcacctcaacatggataagtctttcaactttaacatattgccatgagttacctatcttgaatttggcatatcttgttgcagcttctttgctaatgaatgtattacgagagcaaatatgtctctgttctctcaaaacaactacatccttttcagaaatttcaccatttgcatataattctgaaagaggcatttccaaatcactatcccttggaatctttccacaccttggaatatgataacaactcattggatcattcttatattcataaatggatttgcaattatcaacttgctaagaaagccgtttgaattttgagtagttttgaaactgtttctatgaggactaactttttgtctgactgtgcaacagcatctttcagtaaaaaaacaccaacaatctctaaaatatccaacagatttccactatatcgaataaatgaatcatttgatgggtaggtacactaaaaaacttactaaaaattggcttatattcaggaatttcaaatagtcgttacaactttaaaatcaattttatgtaacttctgttcatctcatttcttccattattatcaacaaaagacaatgggacattagtagccaccaaagcaataacatatgcattcaactcgatcatacttataactaaaaactgaaaaggagtaagtggataaatatcattgagttcttcagcaagtggcagaaagtacaatggaaaaatatgggaaaaagcctttacatcaacagctttaactctactactagtcatctcttttgttaaatagattttaatatcctttggtttctcaatgaattttacagtccccaaataatcatcaatttcttttttatgttcaataatttgattataagagaccaaatctggcgccttaaatacagcagaaacaaatatacttaccactcttttagttatgaaattttcatatgccgtatgcatcaaatttgaacaggcgattttataataatatcagcaaagaataattataattttatttttatagtaatttcttctccattttatataaagttgaaacctttataaaaggacaacaaataaagatattttgaacatctacagaataagatatcgatgcatatgtatctgagttgtacctagttcatatcgatcatgatccttaacaaaaccaaagggaacccactgattaatgataaaacttacctaatcaatagacgcgaccaataaacgatgtaaaattggaaaatgggaaaaaaatggacgaataattttcaattttcctacatctatttcaatttcagttaaaattttgtgactgtcttttttttgtttttctgggatcctccttcttggggtttatcttcggagtacaactacaagtccgatagataaggtaagttagttgatcatttactttagttacaatggtggattctcctttgtcttcatttcctgaagaaactggatcgaatcatgataccaatgttgaaaataatgttgttcaaaacattgataataataatgtaaacaatgatgtaaacaataataatataataataataataataacgatgatgatggcggtgatgatatacatcaagatgcagttctaaatctagctagtagtattgtcgagtctctttataataatactaacaatgatgaaaatgtgattgataatgatgatagtaatatgcaaattgattatgataataacgataagattgattcaaatatagatgattcaaatataaatcattcaaatattgaaactatggaagttcctaaaactaaagatgcaaatgaagatcaagaagatgatgacgaatttgaaagagaagaattgattaaaaacttagtaggtaatgccgttcaatcattagaagatcaaagtaatactagtaatttacactacgaggaagatgacaattacgatgatgatggatcagatcacaatgctcaaactgagcaagatgataatgtagttgcggggaataatgataatgataatgagagtgataaagaaattatgggcgatgagcttgaaaatgcaattgcagatgtttttaaaaatcaattttcatttggtgataatcttgatgataataataacaatgagaatgctaataatgatatcgatgatactaatgtcaatcttgatgctaacgatgataatcttgaaaaaatcgataaacaggattctcaattgattaatcctgaattatctgttcaaagtgaaagtataacaaatgataacttaattgatgacaatgaattagataccaacacaaatattaacaatgaacttgcagatgcgatcaatgatgctttagtaggaaccagagaacaaattgaaaactataacgtgagtgagaatgttgaagaagataaagaagatactaacaaacagaatgaagaaaagtccaaagatcaaaatatcgatgaagatgtatcatctgatgaagtattagatttaaaaagtgcgattgaagatgctttgaaagatacaagatcggtacttgaacaaaaagaaaaggaaataaatgatgaacaaattgaattatttgataattcctcaaatgataaagaagataattataataattttttcagtgatatgaaaagtttagtttcagaagctgtattacaaagtgaaaaggaaaatgtaatgaaggaatcaacaaatttaaatgaacaagaattaactgatgttattcgtgatattgatttgaatgatgttatggctactgcattgaatgaatcttcatcaaaatataatgataccaattttgaattagatagtgctattaaagaagctctttcattagttcctagtgtgaaaaataagaaaacaacaaaatcaactaaatctaaaaaagctcccaaattttctgaatcaaattcacttaaaacatctaaaactagtgatgaaactacttctgaattagctagtgctatcagtgatgctttgaaagaaacaagtttggctggatctgataataatgctgccccttcaataaatgaacaaattgactttgagaaagctttaaatgatgttgttaatgacgtcgtctctaataaccttttccaagatcagttttcgaatcaatttttagaaagtaagacaaaggcaaaagataagaaatcaaagtcatctaaattaaaatccgcccaaaaatttaaaattaaaccaatatcatcaataccatcaatacctgttaataagagccaacctaatagaaatgatttaattccaactaagaaggttatcaaagaagttgaaactcagaaagagaaagaaactgattataattgggatgatattatgggaaatgcatttgaaatggctatgaaaaattcaactgatttagatttccaattagatgaaaatttagagtttcaacaatctgagtttaaggaaccatacaatagaaaacaagcggataattttaatcaattagaaaatatcaacatttatacaccaactgataaaagtgaaaaagcaaaagacaaagcagataagcttcatggaaagataacaaagaaaacattgataccaactagtaaaattggtgattccaatgaattatctcaagatgatttgaacgaaacaaaggatgaagaatccagtaatcaaagttatctgaaatcatctgttattgatacagtaagtacattatttgatacaattgatctatcatcattagatatccatagtcttactaaattaagaacttcacaattagatatgatcaagagaactgttgcatctagcatttcatctctaatgcataatgataataattcaactaaaacagtcacaccaaaacctgatatggatgagaaggaaaggattagatttgagaacagagaacgtaagaaaagatggagagaattcaatatagaaagaaatagagatatcgatttaagaactagagtcattaaaagggccaatttactttatccaaatcctgaacatgaaacattaaaggaacaatggatagctattgagtttgataaaagaaaacaaaaaagactgaagaagcaacaaaaggtcaatttaaattttactgatatgaataattttaatgaaaaagatttagttccatttgataattttttcaataacaaggataattttaagcgtatttctgcaatatataatgaaatgggtggtaacattcaacctgaaaaattggaatcttcaaatgctgataaaagtattgttattacatcaatcacatctgtagttattgcggcatatatgctcacaatggataaaaagattagaaacaatcctgaattttcaactgaaattcatcctatcattcagtctttcacatttttgcttgataaatatttatcatcccctgaaagacgtaaaactggtgctaattcattaatctatgaaagtagatcatcttccaatctaattgataaaccaactttgaatgaagctaccaatcaatttgagaatgatattgttgaatataatatagatgttccaagtacagatacaccaatagaagcatccccaaaagaaacaagtgttgaggaaactaataaaatatcaaatacagaagaattaagtaatatagagcctgcgcttaaggaaattgacaatgctagacctattaaatcaaagaaacaagataaagctgaaccacaagttattgatactcaaccttcaataattgcaccgtcgagtggtggtgttttattcaaagttcaatcgcaaaatccaggaaataataatgttactgctccttcatattcagttgatgttaatttaagtaaactcatcaaggataaaagtgtatcgattgataataaaaccaaacataatgaaatgcgtgggcatttcagtattagtgaagcaccaaattttagagtttctaaatctttgaaaaagaaagagaagaaaccaaagaggaagcaaccagcacctgttattaatatagaacaatttctgtcacctcaaccacctccgccttcattattacaaaaaagaaagatctctgaagtttccgataataatgttgtcgaaatggatgttcctgaacctaagaaatccaaaattatacaatttacacaggaaattgtttcagaaccagttgaacaggacacctattgttgatcgtactattgttagaaatacaaataataataaagtaaatgttactgagtctgtaattacaaagaaaaaagataatgattttgttatggtaactaaagatgatttgagcaaggatgaaaataagagattggttaaagatgtcaaggtaagaacaaagagagcaccgattgttaataggaaacctgaaattgctaaaattccattacctaaatatggtatgccaaatattaataaacctgtcatcaaggcaccaatttcattgaaaaaggcaatggagaaacctacagatattagacctgttagtaatattggaactggattacagcgtccaggagcatttaggagaccaggagcatttagaaaacctgaatcatcttcaggtgttgggaatatccctaaaccgggtatcattcctaaacctggtttaattccaagcataaagaaagtctgaactttttaagtatattagagaacctgtatattactattgtatttacccgtgtgtaaatatataccaacgaatataaacgtaaatatatgaacctatttgtaaatttttcaaatattattaacattaccttcagttcaaaggacctggtgctggaaacggggctcagcgactacatgctaaggtatatactaaactgagtttcaatggtatagcttcaaagcaatcagcattagataagccttgattaaagttgatcaacaaagacataaataaaccctttgcatttatgcatattggggtgacctgttcagccgggcgtggtattgatagaaggtcaaggaaacgactttcccatagtgaaggagtttagaaaaaaataattatgtcaacatctcaaacttttttgcttacggtaataatttacactgaataattgctgttattactggtaactgcactgctttaacccaattcaacaacagcattgaacttcggatattgttcgtcttgttttaggataggcaacaaactttcaaataaaaatttaactagaagagaagttcagctttgttaaaggagtaagattttggcacctcccaaatttttttagtatctttacagaactaaccaatacatgtcaaaatatacacatcccattgacttaagattgaataatttttaaatataaatatgccaacagataagaaaaatagtaaggcttcaagtgaattgccaaaagactctgcacatatacaagctacgcccgctatgatgagtgttgttgaggaacaatgtgacgatgatagtagtgtccttcatctttcacaagttccagcagatactccacttaacaatattgctgatgacaaagtactactagttccgttaaataatcacacaactgcagtgaaaagtatcacacagaaacttgatgattctgataaggaaaatttacttgaattacaagctcaaactcaagctcaaactcaagctcagccacagaaagttaatgaatagtatccctttcatagttgaagaatcgaaacctccctctttgaacttaaatttatcagaaaggattgattcaattaataagaaattactagatcctgttgctgttactaataaaaatatcaatgaaatgaaattgaagaaggcaacaaatccaagtatatccagtttgaggacaatgtctttacaaggaaataatcatggaactgtatcatcaacaagtactacattgaccaaagattcatcgagagctgaatatttttatactaaagttcatgatgcaatgaaaaatgatactaatcaaaataaccatgcaactgaaaattttgtttatggtttaaacacatcaacaccattatccgaacaaccatctgacgctgcaaatatagagaactctatagcatctaaagacacaaaaaagaataaattgtataatacagtggatagtactcataatagagaaaataccggtaccattgacacaaccaaagcaaaagaaaaactacaaaatgttttcaattttgaaccggaatcacctacttctaagaaaataatagatgaaacttttgatgttaaatcacgttcttctctgggatcaaggaaaagttccaagaaaagatctatgagaaacttcagtgatatcccagaaatacaaccaatgagcaaaattgataatgacgataaatcagtgaataaattaagacagataacgtcaagattgtttgagtgtaaaagcaatcaaccacgtcgatactcatccattaatgatgattatacaaacactgattcttttgaagaggatttagaatattacgagccaagtctaacacatatggtttataataatgatacactaataccaaatggtaatagttatgaagataatgaatataataatcatccaaataatagaaatagttatgatcctttatacaatggtcaaaatcataatactaacaacaatgatcattttgatgatggtgaactacaaagttttttctcgatgaattataatgataactcagtgaattctcaaaaacatgattatcatggtaaacctaatcataatgtattaaatgttcaagattatggtagtattcctggtgataaaagaaaaatggtttggaagagatcggatatttatagctcaccacatgactttacaccacatcgtgtgaaacgactcagaacaattaagaatatatgctattctgctagtatcataatactgatgttacttataggtttcatatcaggatttgtgttagcaacaaatacagaattacaagatttagaagttgttgatgtaaataatatgttagtgagccaagaagaaattgtgtttgatatggtttttagtgcattcaatcctggtctgatatcaattactgttgataatacacaacttgatatatttgctaaaacgcaatatgtttattcaagcgatggaccagaaggtcaatatgaaacaattttattgggatcgattgaaacattagatatcccgctttattttcaagggggtttcttaaatcgtagaaaagatgatagtacaactcaattaaaaattataaatccatgttccaatgaaaggtaatgatgatgatgatgatgatgacaatgatggtggtgatggtggtgatggtggtgatcataatggcgatgatgacaagtgataaaaagaagaagaaaaagaaaggtaatggtaatggtaaaagtgaaagtgaaagtaaatcaaaagataaacatgaagagttagttaataatagctttggaaaattttctccaccagatgaaagatggctgaatatttcaagacatcctttcgatctgattattcgtggtgtgatgatgtatagattgccattttcatcagaaaaccacacaatttccataagctatacagcttatgttgatccaagagatgatttaatagtataatagtgtataatagatttttataatttggtaatgtataaaacaaaataaaatagaacaaaataaaataaaataaaaaattataaatgtaaacaaataaactggtgataatgattataaataaaggagaaatgtagataaaaataaaaatgattaaaataaatagtgacggaatgaaataaagaaataaatgttatattataactaaacgaaagtaaagtaattatgcttgattagaatgaccagaataactacctgcaactatagttttcaaagttggaacatctgaccaatcatcaacttgtttactaagaccatcaccaaatggatcttcaacaactgtttcacctcttgcttgaatttctaaatcagtatttatgaaatcaattctacctgcaccatcttcattggagatattaaatttaatttgaacacctgaatcactttcctttgctaatttagttgtcttaaatcttgcaatgaaacgttcttctttctttgttgaagttaaatgtaattggatctttaacaatccatgtaactctacccttttctttatttaatgaaccaggtggtttagttgcagctgatgaaacaagtgcatctttaattgaaacagaaactataaaattagttaatgttaatgaacctattgttaaatattcatcaagttcatttgttggtttaattgaaatacatacagttgattgattagtttcatgtttccaaactggtgttacaataattggaggtttggtatcatttaacatatatttcaatgcaccaacagttctcattgaaatttgtgtcggatcactaattataaatgtatcttcattaacttgattcattaataatgtattaacagcaaaatttggtaatttaacattttcatttttggaggaaacttttaatgaaagttcagagggtaattttttttcatcatttgaaatgaatgaaaatgcaacttcaccaattgcatttgatctagttaataaaccatctttaaaggttgcattaaataattcaacaattgatgcattaaaacctgcagttgttaatgatggatgaataattgcaccactaactaatccaccaccaccggttgtatttctttgtaattcactgttaactgattcagatcgttgagtaccagttggagcaggttgtaaaggttgttgttcaattaacatactcttacgttgcgttggaggaacaggaactgaatttcttggttgtcttaaattagaaactgatgaaggagctggaacagatggatcagttgaaacatgttttcttgatgatggtggtggaggagcaggtgcattattgttattacttaattgtgatgcttcaggaataatattcatattatatgcagttggcggaattgatgtaatacctgtagttgatgaagctggtggtgtatttaatgtactatttgaaactgataaattatcaacttgaggaactgatgaaccagataatgaatcagatcttctagttggacgcattggttcataaaatgatggttcaacttgtttttgttcaatgattggtgattgttcagcttgctgtggttgctcaacaggaacaaaggttgaaacagcagctagatttggtgctgaagcttgttgttgttgttgttgttgttgttgttcaattgattttggttcttcggtatgaacagtttttgagagtggatattgaggtaatggtttgttaacaggttcagcaattgaagattgtctgtaaggatgttgattttgaggttcatcctttggaacatttggtggagcaacattagcattattattgtaatcattgtgattattgatactactatgaatattattgttactactgtaatgtttaacagaagctaaagattgtgaagcaattgattgatttctttgtctattagcagaataatcacgaggattggttacttctgtattaattgaagaactatcaggttcatgaatagttgaaggaggagtaaaatcagttggtgttgaatctttaccatttttcttacgacctttaaaaattgaaccaaattttgaacgcattgcacctttttctttctttttattatcattgaaagttgatgaagtatttgatgataacattgaagtatttgatgataaacgtttactttcattatttgaaatattagatgatgaaggtaaatcatgatcattatttttctttaaatggaaacgatgagatgataataaacttgaatgacgttttgagacagcagcacctgcaattgcaccaccaacacctgcaccaattgcagcaccattagatggtgaagaagtaaacccatcagttgtgtttcttgattttgatactgcatcaactttaatattttcaacaggtaagttagttttaattacatcatttgcaaatctattaatttcatcatcaacgttaaaatttaaaacgtgttgtaaaccattttcattatcctttttaaattgattaacaacatcagcaacatcagtttgatatttaaggaaaacatcttttaataataataatctttgataatcataattttcaaaaatttcaaaaaaataaggtgcctttgttgaccattcattttcaaaatcatttaaattaccatgaccattttgaccatttttcagatttgaagcaatttcaattaattgatccatttcaattaaatttaaatcattatttctagtaaataatcttaatggagcaatcatatctctacccatttttctagtactttgatcaaataattcaatttcattattaattatttttaaagtatcattccaaatcggatttaataaacctaatgcatctaattttgaattttgtaaattaacattttcatttgtgaataattcttgaccagttttatgaattttctttaattcatcaacataatgtaattttaatctaccataagaagttaaccattcagataattctttattaatttgctttgcttgttgacgtctaataactaatgattccattgcttcaattggttgtttttcaaacaatattgatgaagaataaaccacatgttgtgattcctcgttagattcagacatttttgttgtttgattaacagagactgatggttaattaagatttattcaaagtcttaaaatgattactaaaatcatgcaagctataagtaatgcataaaacaaattataaactcatccgaggactcgaaaattacttattaagatgcagcaatgtattgatacttcctaatggggaaagtgaagcgaaaatacaatttctattaagacaattacacaagattacacattatattaaaatcattaaagcattaaaacattaaaacattaacttaactgaagatttcctttgataacaatggtaaaaggacaaaacaagcagttgttaaagcttgaatattttcccaaattgctaatgggaatttccaaaatcctctatcaataaaatttaaataacacgaataaaatgcaactgaaaagaaatgattaaataatgttaaagaacttggacataaacctgataataaactaattggaccattaacacattcaccaccacgtaagaaataatagaaacatccacgttgtaaaattgttaaagcactagaatctgctgcaaataatgtatataaagcaattgataaagtatttataacaacatctaaacttttcctttcattatgaaattttttcatacaattgaaaactaatgaatgatcctttaattcatcatttgataaagttgataaaatttcacacattaaagcacaatcatttaaaccaacagtcataccaccaccagttaatggatgtctcatatttaatgaatcacctaaacatataaaaccaggtttatcatttaaacgagctgttaaaaattgatttggcattgctttataaatatttgaaccatcaaaagattcttcataagatttttggaaacttggtttaatttcatttggtaaatttggtaaaacttcatttgataaataatttaaaacatcattacgttttggtaaagtatttgatctataagcacataaaattcttgaatgatgaggactaatttgataaataagtacaggagcatgattacctaaaataacatgaccatgatattttgcaggtaaatttgcatcaactaaatctaaaccaataaaatatgaaccaattgaaggtatataatcttttgataattcttttctaaattttgaataaataccatcacatgagaaaactaatgatgcattaaatatacctttatcagcaacttcaatacctgtaactctaccatttttttctataattttagttacattaccatctaatttagtaacatttggctcatttaaacaaattgaacgtaaattcattaagaaatcaccatgatgtaatgcaacacctctaacaaatggagatttttcccaatcatccatattaagagtttcatcagtaattaatttatcacttgataatttatttgaagttaaagcaccaggtactggattaatattaattttatttttcattaaaattgatttttcaggataattaatttttaaatttttattaaagaatgaaatataataaccaactgtttgaattgcattaatattattaacagcttgagccatacctaatcttttaagagctaataaaccagaaggttgcattaattcaccaacaattctattaggtttagaccattctctttcaactattaaaactttacgaccttgacctgctaaaactttagctaaacagggaccaacaacccctgcaccaataactatagcatcataatgttcctcaggtggacatgattattcttgtagtgttaatctagtcaaatagagatgtaataaagagaagataataaggaagagattgcagagtttaaatacttttcatcaagtgaatatgtaatgatagtaataatataataataataatagtaataaatggcgtgttcatcgtagcgctcgtatagtaatacaattaaggattattatgtcatacacttcaaagttcgcgaaacttgtttttcatcactttttctcttctttcataataacatctcttattagtgtcctactctcttccgttgattgagtataggacattggacactggacaatgtggaatgtatggttatggttatgtatttattatattagtatggtagaaggtaatgcagaagttagttggatactcagattgaataactgttcttggaataccccttatgatcaaaattcactacattttagaaaagatattcaaataccatccataatagatttaccatggaaacaagatgatttaccatgtggaattttcgcaattattgcatcttggactgcaattgatgcagtttccgttgatatagatgatactactataacaattatacaagatggagtgtacgtaagagaagaagtagatgatgatactaataataaggctcttgttgatgtacgtgtactggatactctatggtttataagatgagccttaaacaaataaaataaaataaaataaaataatttatttcttcgcttcactgtgagagacaaaaaacttttttttcaacaattttttagtatgaggctgtgtgcagtgatagtcaattatatcagaacaatatatattatttatatctcattgaatctcttcttatctctatttgtacccctgcactgccccaatgtcaaacgatcatgcaaactactttctacatgaaaaatcaaatattattgatacttcaaataataatataacctctaatactaatactaatactaatactaatactaatactaatactaatactaatactaatactaatactaatactaatactaatacaactatccccaataacattaataataacaatgacatgattaataataataataataataataataataataataataataataataatatcaataataatatcaataataatatcaataataatatcaataataatattaacaaacaagataataatggtacccacaataattcttcaaatataccctcaacattacccgctttaccattacaatggcctggaaatgatacatctcaattacttactcaattatttcaattcaatagcttagcaaatcaaaattcaaatcaaaatctaagtataaatccaaatcaaaatcaaaactcaactattaatataagtggtgttgaaataccttcaaatcgtttattacctcctcattcagataatttaatggatatacctcaatttcatataccttatcaaaattcaatactgaacagacataatgttcaaaatattataatttcaccaccatcttcatcttcaacgtctcataaaaactctttatcaaattcaatatcaaatttaaattcaaacataaattcaaatataaattcaaacataaattcaaatataaattcaaacataaattcaaatataaattcaaacataagttcacttataaattcttcaccaaatccacatatacaacatcatcataatcatcaacttcagcagcaacaacatccaccaatacttgaaattaagaaaaaatttatatgtacattcccaggttgtggtaaatcattttcacgtaaacttaattatacatcacattataattcatctcatgaacataaaaaaccattcaaatgtgaaatttgtaattcattctttgcaagacatagtgatcgtagaagacatgaaaaaagtcaacatttaaataataataattggtttatttgtagtgggaaattcgaaaataaagattatggttgtggtaggaaatttaaacgtcgtgatggtttaacagctcattggaaaagtcttaaatctgaaaagaaatgtttccaaggtattaatcagtgatgctttaaaggttttacaggaagatatacttaaaagttatataccaaattttaattagttacgtaattattagcataaaatttgtgtaaagatattaaaacatttatggcagtcttggtttatttatagatcatcattacatgtcttttcaataaacattaaacaatggtatctatacatttcacagctatattatcactattatcattagtaaatgcatcaaaatttcaaccatatcctaatctcggaattagatcctcaatcttataaaacattaccaaactggtgatgaaattaatttacaatgtataaatagacaaattgataatggtgaacatattttcaatgaagaaggtgaaattgtttattcaccaatttttaaatgtttagaaactaataaacctttctcatttaattataatattgatagtttaaaaaaatgtacggttaaatttgatgatgaaattttccatttatttcaattatatttacataaagatgctccatttacttgtaaatttgaattacgtccaaattcaggtatttatattccattagattttagttttagaggtaatgttttagaatctcattttgatattgatccaagtattaatttattaatgttacattcgaatgaaaatgaattaattgcaggtactgcattctcatcttcattaaatacaactaaagttataattggtcaaaatgtagaatttaattttaatattaaatggccaattgcaaataatcatataattaattctgaaaataatattcaagcttattatgttgcttcaacaaattctaaaattacttggattttcggtattgcaggtattttcttaggtatagtattaactttaatattctcctataaatcaataaataaaaaagtccaattaagtacatggaataaagttgaatagttagttttttattctatacgatatatatatatatatatatatatatatatatatatatatacgattttctttatttataaatctaaaagaaaataaataaataatatctttataatttctttaataataattgtaaaagtgattgagtttcaccttcactgtgaattaaatatttatcatttaaatatttaacataactttcccttaccttttccttaattttatcatctatttttacctttgatttccatgattgatataatttaacattttcttgaagtttattaataaattcatcatcatcaattgaaacgtatcttaatgataatgttaattttaataacaatacattaatatcattttcaaatcttttatttaaatcatcaataatgtaatcacacatatgaattctatctaaaatatcaaatttatcaattaatgataatattttatttgataatttcattatcaatttgtatttttcatcattaatttcatgatcttcgatattaatttgatcattatgttgatattctttttcaagattttttatcattgtttcaatgaatacattatataatgtcataattaaatcaccacgtaaaactgggttatcttcaatactacctaatgttgaaacattcatttcaggtaatgcatttaattcactatttatttcatcatcaccaacatttaatgtaacaatgtcttcaacatcaatatcatcatcatttttggtaccttcttttttactttcattctctaaatcttcaatttgtgaacgttcactaactaattgtaataatttccttctagttaataatttagataaataatttaattcaaatttaataaattcaatccaaactctttcttcattaagattaaatcttaaacatctcttaaataatgctcttgcacctttaacatttttattatattcatattcccattttgcaccacttaaccaaacatcaatatttcttggttgtaatgataataatttagaataaatatcataaacaactttaacactttcttgctttcttgcaaattttaaataatttgcccataattccatatcacttggaaatttatttgttgcttttttaaaaataattaaaattctttgagaaattgaccaattactaatacttggagtcatatcaatatgatcctttaatctttgaattcttttctttcttaatttatcaagtgttttctcaaatttaatgtataataaataatcttttggttttgatccacgacctgaaattctatgttcaaaatcagttctacgacgaacaatcatattaatttcttttctttgaaataatccacgtttctctaaatcttccaattcaggtatagatttttctaatgcatatctagctttatctgacatgtttttttggtgattgtagaaagaaaagttgtaaaataataatactgtaaattatttcaagaaaaaaaaaattttataaatttcatgcaaatctcggattcatgttgaaaaattattacttaatccccttatacttagaaaatttaataatattgataagagtttaacacataatcgtttctttaattataaatataaaataatatacaaaatattaattagacttgctaattaatttacactacaccaattttgatctgcaaaataatcacaaattttagaaattttattatcatcaagtttaatagattcagttaatctatctttctctaatttaccattattaattaaaatttccttaaataaaacttcctttgtgcaaatataagccttggggaaaatttttaaatcttgacaaagttctttctcagaatctgataataaatgataatcaggagattttgaaatatctaattgatctaatgataaagttaattttttctttgtctttgaatcaactggagttgacattcttgaatttgatttacctgaatttaatgtatgtctttcctttgttattgaactcaaatttgaattcattattaaatctgatttacttgatgaataattattattgagattactatgaatactatgattaccatttgaaattgaatttaagttattagcatttttaagtttttcacgttcaaaattttcaccatcttcaattgttaaaataccattctctctccattcctttaattgtttaattctatttttcaatttaaattctaattcaatatcatttgaaaaattttgaaaatcctcagatgacattattcttgcaaaaggtttaattttattcattaaatctctttcatcttttgatcttttcttatcaattgcattattatttttataatctaataaattatcatcaatcattaatcttttcctttcagctcttaaagttaatttttcattataaatatgtaaaattaataattttaattcaatatcttcaaatgattcatcaggatcaaaaatcatatcttgtataactttttcagcatcatcatcaaattcttcttcaaattctaatctaccaggcatatatttttggatataagaacataaaggttgagaagttaaaactttttttggaggtggtaaaggtaatttctttcttgcatcaaatctttctttacgtttatttaaaaattcattaattgaaaaattagggaaattttcatttaaatcaggtaatggataataaggagaatttaaataataattattataatgattttcaacttcttcttttgatctaccttcaataaaatctgcaatatcttgccaattacctaaacctaaattttgacaaccttcaattaataataattcttcatcagcaccccaatcttcatcaaaaattggatattgatgttgttcaattactctataattatgaaatggtttatgtttaccagatgatttaccatttgcaaagcaaggtacacaaagatcataatcttgacattcagcacaacttatacgtacacgtctagtacaatcagatgaacaaacatcacaatgaaattgtcccattatatgaaatctataatattttcaacaaaaagtccgaattttttcccccggagaaggttttaaaaaaaaaatgaattttaattggcaaaaaacagaaaatatggaaattcaaaaaattgaaattataataacaaagggtatattatcaatcaatgagtaatatacttatatactatatagaatataatataaagtataatagtaattggaataatattattaataataatatattaactaagataagataagccgtaaagtatatagagataccccttataattcaaccacttaaacagttcaattgataataccataataataataatttaagaaatggatgagctgttaaatttttaaaattttaatctctcttaaataaatatgtcacgtgtgtggtataagggttacaagggctaggttttagataattttttaaaaacaaaaaattacgtttacaaatagacgcacttttgaaaaaaagtttactcccatatacaaaataacagtcacaaataatgaaaataatttttttcatttttccaaagagtgcgtatagagattaatttacagttagtgaaaaatatcaataatgtagtaataatagtaatatcaatttctttggatttacttgaatttattttgaaatttttttaattatcttattgaacaaccacttttaatcaacttttcaatatggtacgtaacgacatataatatatcaataatgaatctaattgttaaaagacatctatatccccatatatccctaataccacccatgttatagtcaattattgaacaatttacgtaatgaaatgacaaatatccaataaagttattaaaatatttaataaatcaactctaattataatatcaataaagaaatattactaataattatatattgatatcatcattataatataaaaaatcatattaagatattattaagatataagggggatataatgttataaacatctttctttaagaaacaatatactaacattataatttaatatcataactttttaatttattacagggtagagttagaacaaagactgttaagagagctgcaaaagttttaattgaaaaatactatccaaaattaactttagattttgaaactaacaaaagattaacttctgaaattgcagaaattcaatcaaagagacttagaaacaagattgctggttacactactcatttaatgaaaagaattcaaaaaggtccagttagaggtatctctttcaaattacaagaagaagaaagagaaagaaaggatcaatatgttccaaaggtttctgctttagatttagaaaagaacaatggtgctttatatgttgatgcagatactgatgctatgattaaatctttaggtttcaaagttgaaacttccgtctcaaatgttaacggtggtgcaagaagattcagaaagtaattatcgtaaaaattttaatattataatataataacttaacataatattttatataaaattttctatttccattactctgttttaaaaaaaattaaaatgatatattaattaatttaatcctattttcaatagcaaagataaaagtagtatctttcttaatactctttattcaatctcttcaacaattttttcacaatattcttttaatattttcgatcttttatttaattcattactgaactcctctaaatttaatgcaaatccgtctaaattatcccttaataacttaattcttttatcatatttaattctagcaattataagttcatccattaattctttatattcttttgcaaaattttctggttgttcactccattgattgaaattataatgtacaaattcgaaaaattgtttctcattatcatctaattcctctgttttatcctttttaccaattatatcataataatcattctcttcacctttcatatattcataaattgctttatcatttataatatatttaattggagtttgtggccttttattttcattatcaacattaagatcatcaatttcctcttcttcttcatttgatccattagtagcttccattgaattaacgctaacttctctatcaatttcttccttttcagtactaagtttaatctttttcactaattctttatcatttctacaatcattaccttctctatcccttttcaattttaaatttctttcaacgcatggtgatgaaagaaaactactattttcatcacttgaatatctcaattgtaaactgatattctcctttaatttcttttccttatcaattattttcttattccccttttcctttaatgatcccttactatctaaatcattaaatggacttgagatattaacgctctttttagtattttgattaatttcatagttatttatctctggaatttccatcataaattctaatatcttattcttatcatttgattttaatttgatactattgctacctatcagacttactctccttttctttttccctctcttcaacattacctttcttcacctaatgactttcttatctttaccattattaatattattattattattaacatttaaattagttttatcacgcaatacactcttactattatctgatttttcaagttttacttgaatatccttattatttgataaaccatcactaccgtttttacttttaacattactattattactactaatattattactattattgttattattatgactgttttcgtcacgttctttctttacaatcacggtaggtttattcatcttacctttttaagtgaaaactaccaatgaataatataccacaaatgaagttaataaaatttgccgtgcaaaagatatgatgatgtcaaaaaaaattaaatgagccgccccgttctcactctctcttattaaattcggggttagatttaataattctgaaatactctttgttaggtactctatatcaaatatgcactttactatggtgcagctcagccgtttcctccgtcgtgccctggttaaaatgcacatctcgccgagcacctactaatttcccctatttactatacaaccttcatataatgagcctttccttcaattccaataattttcacggacctttttacgagatttaaactcggagtttatgtatgcatattttacaaattcgagttttaatttaacttacatacaatgcaaaaaattaacgtcatccctataatttactcaaactatatgatatacgagatattgaataagtagttttacaaaataaatatttcactattaataactattgtcttttaaccatttagaaacatcatcaccatctcttgcaatccagtttgctttactcttgataatttctaaagattgagctaaacctttatcaaaaccttttgtatctttggtcttgaaaaattcttcaacttctttatattgttccattttagtaaaaccggttgttgaaacttgaacaattgaacctaacatacttaaacctggtggtaataatttaaataattcatcccaattagattttaaccaatgagaataaaatttcaataccaattttattacttctcataccttgcattggtatatacatatcttgtaatctaattgtaccatctaataaaaatttcaatactttatttaaaatatcagtattggtaaatttaccaaatgatcttaatgcaataattttttcatccattgattgtgggtttttataaatacttaataattcttcaaattccttttcaccacctgttttagcaactgtattgaaaatacatgcttttaaatttggattaatactttctttatcacctttaatatatttagcaaatgattctttgatatatgagataatattttcatccccagattctgcacatgctgcaaataataatgcctttaatctttgatctaagaatgaatcatcttccttaaattcccatcctaattcataacatttttccttaactaaatcatttaataatttagttaatgatgatttaattttttcatcttcaaaaatccatgcagatttaatgttgtaaactctagttaaaatttcatcccagacaaagaatgattcttcagttgatttccatttaataactaatgataataaattacttgttttagtataacctgaaactgataatgcaccaacatcagaaactaaaccaattctatcttcaactgataaatattcagattgagaaccaaatttaacccatctttcatcatccatagttaactctacaaactgcattagaatcaccattaattttgaagaatgatggatctttaatcaaatcagttaaatctaattctctttcctttaaaatagtatcattgatttgatcctttttctgtttttaagttgaggaaaactggataaacagtttgatcatcttcatctttaacatcaccagtagttaaaaatctatgttgacaaattttaacatgtttaccagattcttcaacattgataattggataaccaactttattagtccaaacattcataattgatgcaacatcttcacctgaaacaaatgataatgattcccataatgcttctgtctttgcattaccatatgaatgtttctttaaatagtgagaaacacccttaataaaagtttcatcaccaagccaattagctaacattcttaaaacagaagaacctttttcataagaaattgcatcaaaaatttgattaatttcatcagctcttttaactggaacttcaattggatgtgaagatcttaaaccatctaaactcaaagcagattgtaatgagtcaccaacaaagttttcccaaactttccaatctgggtaaaaatgattacaacatttccatgacataaaagttgcaaaactttcatttaaccaaagggaatcccaaaaatccattgtacaaatattaccaaaccattgatgagctaattcatgagcaacaacttcagaaactcttaatttggtacttaaatttgaatttttttcattaaataataaatcaaccattctataagtaactaaaccccaattttccattgcacctgcactaaaatcatgaataccaaccatatccatttttggtaatggataaggaatatcaaattgagtttcataatattcaagtgcttttgcagctaattcacatgaatatcttgcatcaacttcataacctggagttgtataaactctaattggaacatctctaaatttatattcagattcaatataagttaattcaccaacaatgaaagcaactaaataagttgacatataaggagttgtattaaaatgaacaatctttttatcatctttaatatcttcttcatttttaacatccatatttgacaagaaagttaaatgtttatcaccgataagagaaattgtgaattttgcttttaaatttggttcatcaaatgatgggaaagctcttctacaatcagttggttccatttgagttgttgctaaatatttaggttttaccatcttgttcataagttgatctatagaaacctgccattttatcatttaattcaccaataaatttaatatagagttgaattttatcagttttaaattcattttcaaacttaaaagtagttgtttgatcatcttcattagttgaaatatcaattggtttaattgtttcattattttcaatgatatgataatcaagtaattctaattctaatgtatgtaaagtaataaatgatgatttttcaacaacatctaaattaattaaaacttcaccagtaaatttaaatgtgtcaaataatggttcaagggttaatttataatgttgtggtttaacattagtaggtaagatttgtctttctgacattactaattgattaattgattggtgataaaagaagaaagatgactctaacggggtagaaaaagttaaggtggcaaaataaatttgaatttattttataatcaaaattatgttggagccgtgccatatactggataagcaggataaataaaccgccggagctccgtaaattgtttgaatattcaatgaatttagttttacttttaattattaacaactatataacggtatatatggtaggatgagtatatgaatgagtatcaaatgctataaacatatgaagaaaactttaaccaattctttcgattaaatgaacacctgaatcagtttcaacaatatttgataaatcaccaatttgtaaagccattgcagctttctcaaactggaggttgcatttcacctttaccaaaataacctaaatcaccaccttttgaatgagaactacaatctgaattttctttagctaattcctctaatgttatatcacctctttcaatttcatctttataacttttaagtttttcaattgcactttcctttgtacgtgtaatttcttgttctttccaagaacttggtttacgtgattgattatgtttaataagtaaatgtctaactctaactttagttggaatatgtaacttttttgataaataatcatttagggcatccatatctgtacctgctggtggttcccattgactttcttcagtttgtttattaaaatagtattcatgattatgagtacgggaaattcttatagtccaatcatctggtaatccggttgacattgtttattgttaaggagaagataaattgttaaaaagctactgaagtttgatatagttttaggtttgagatgacacattgcgtattgcacatggaggctagaaaaaaaaattaaattttaaattattaagtaatattcctttactatggagtatatagcttgttctttcttcttttttcaatcgagaaacatgggagtttttaaggacacgcctaaatcacactatgcatcaaaggaatcacgtcgacgtggattacaaaagaccagattttactgtagtacatgtgaaagacaatgtcttgatcaacatggatatgatttacattgcaaatcagagactcatattattcgtttccggcgcgccgtccaggagaatggaggctcattaaataaattagttaataataaatcaaatgagtttcataaggagatgataagtacattaagacgtcatcatggatttaaatctgttaaattgaataatctatatcaggaacatatagctgttaaggggcatgttcatttaaattctacacgatggccatcattgactgcatattcaagatttttagcacaatcaggagatgcaagagtttggaatgaaaatgatggtgatgaagatgacgagtatgatgaggatacattctcaccatctggtattacagttgcctatatgaaaaaggaaataaatgataataataataatagtaataataactctaaagaaattgaatacaaagatgaaactattgaaacagtgataatcaatagtgaaacacgcactactgacatcgacatcccagtgacacccacagtgaccctcccagtggaagacataaaagtcccacaaaaaccattagaagcgcgtcgtacactaaaatttgcccttaaaaagaagaaaacttaatagcgcgttgttgacattttcccctttgtgaacaaaatttaacacggttgacacgatataacccatttcaagccatttgaggccatttaaggtatattaattactattgtttctttattctcctttgtttacttgttaattattcacttatttaactgatatatttcgtattaacattcctaataaggacgtctaatagcttaattgtttattattatttgttattgtttgttattgaatcatatttttattataaactattccgtatcctgtatttccttgttttttcttatatacccataacttttaattatcatttgttatatatcacaaaagtttcatatattatactattatcacatagtcaaataatcacaacaatgtccgttatacaaacaccttctaaatcaaatgtttcattacctccactatcttccattttattaaataataataataatatcaatattaatatcaacaatacagttgataattcaatcaataatacatccttctgattctttttcaatattttctaaaacttatgatacttcattgaataatataacttcaactccaattttaacaaaatcaaaatctttcccttcaaatcatttaccaatgccaattcagttaccaaatttacattattctttacaaaatattcacactttaaataattcaaataaattaccacttttatctacatttaaagattctacattaccaaattttagtacaatatcaaatttaaattcaaattcaaattcagtttaatgctccaataactcaatcaactccactgcgtaaatctttaccaattcttcatattaaaaaaattgatacaactgatattttcaatgatacaacctaataataataatatcacaacaataagtcaatcagtatcggtatcagcaaatttatcatcatcaagtaaaacaacagcatcagtaactacaccaatatcaaccacatccacttcatcagcttcatcagcttcatcaacttctactttcttcaactccaaaaaagaaaagaaatttagttgacgaaagtaaaagttttgcatttatttcacattcacagaaaactttcctttcaaatgaacctgatattgataatgcaagattagcaagacgtaaaagaagaagaacttcaccaattgaattatcaattttaaaagaagaatttaagaaaggtatgacaccaaataaacaacgtagaatttcaattgctgaaaaagttgatatgactgaaaaggcagttcaaatttggtttcaaaataagagacaatctttgagaaaatctcaaaatgtacttcatgagtaataatagtgaaaattcaagtataagtacaagtataagtaccaataatagtgatacagatgatgaaaataaggaaaatgataatttaattgatgatgataaggataaggatgatgaaaataaattttcaattataacaccaaataattcaattatacgtaaaccactgaatgatataacaaattcaagtttattacaaaattctccaacaagtcaaacattcaaatttaaatcaactgattttggtctgataaatcataattcctccaattcacgtaaacaaaagccaattatgaaattaaagatgaaaaaggaaataatttccaaataaattttcattataaagaacaaaacctaacctaatgctaagataatttcacttcgataccgttatattattattatattgtatactacaccatttatagaattttaaaacttaatgataaatttatgattaaacatgttaatgatttaactacaggacattagcacagtattacaataaataacattattatttttttttttttgagaaatttcttaactaatttattaaagttaacttatttagagttagttagtaaacaattttattatatataaagataaaaagtgaattaatttgtttaatattttttttggaatgaaaaacaatttaataaatccatcacaattaagcggatttaccctttctaccagtagttttagtatgttgacctctaactcttaaatgccaatgagtgtcttaaacctctgtgagctctcattttctttaatctttctaaatcatctcttaatttagattctaagttatttgctaaaacgtggtgatctttaccatcaacaacatccttttgtctgtttaagaaccaacctggaactttatattgagttgggttttgcatgatagtaacaattctttctaattcttcttgagttaattcacctgctctctttgaaagatcaacatcagcttttttacaaactaaatttgcatatcttctaccaacacctctaatagtagttaatgcatacataaccttaattctaccatcaacattggtatttaacaaacgtaaaatgtgttggaatgaacctgattcgtggacaactaaacccatattgctcgtttgttataagatagaagtttaaatgaattaaattttaaaaatttctaagttaaaatagattatatcaaatattatgataatagtaaatgaatgtaaaaaaattgaaaatattcaataaaatatttcaccaatattatgagaaattctactgtaatgaaatattcatcatcactggggacagtccctccattaccctcgaatctttaattttttttccccagtgagaaatttcccttaagtgaggggatctctttttatggttcacttgtagagtgtggtgcgcgggtgattggcaatgttgtaatgaatcagccctcttgtatgtcacgtgtgtttaagggtttttcagatttattttatctatgataatgataataattcatcaatacaatacgatagatataatttcattatttacatgattaataaactatatagatgatataaacataaatataatatactataaaaatagtgtgaatagattattatactaaacaactctataaattaaggaatttagtatatttagttgccatataatcaaaagcatctttttcaataaacattctattagcctttaataaatgtctaacttcaacttcatctctttgtaaaacagttaatttattacttggatatcttaaaattgattctcttaaatttgaaactttaaaataatcatttgcaataaataaaagatttaatttatcaaaattatgtgatttaataaattttttaattgctaatgattcagttgttacaatttctaaattaaatgaatcatttggtaataatttaattgaatttgcatctggattattattatctttaccaattataaataaattacctcttctaaatgcatcacttaatgcaattctataagcaaaatgataaactttatttggtaatttagttgaaaaatcatttggtgcagttctagctaacgcataagcacctctccatctaattggagaattcgcatcaccaactctagctctacctgtacctttttgtttaaataatttttttcttgaaaatttatgttcacttctaccgggtggacttgatgcaccaactcttttacaatctaattcttttgtaactgctaaccataaaatatctcttcttaacggtgcattgataaattcattagtgaattgcaaatattgaatgaggttctaatgatgggaatgatcttaaagtacctaaactataagaacgtggagttattgcatttgggagtatattttcattatttattaattctgattctgattgtaattgtgcttgtgattgtgattgtgattgtgattctatagatgatgttgtagtagtagtatttaatgataacttagaagttgtgaaaaatcttattaaaggagatacctttatagatgaaactaaaggtgtacgcactagttgaaacatctatgtttggttgtaatgaacagatagatatatgacctacaggttatcatccaagcattccattgatagttattattcatgaaaaatcatgagaatggttgaaaaaaattaaaaaaatctaaaaagtgaaagtcgcgtcgcaaaaaaagtaaaaataatccagacgcgtctgtgttacgtaatagattctggggttgtgtacttaatagtatatagtagttcccctgagaacgtgccctatagtgataataatagagttgtattacattgcattgtttacttagtgtacattatcaatgggttatattcattaatcaattgttgatgagtgattattggttaatattgattagaggctgagtgattttctaataaagaagttgttatcaccgatattcatttccttattctaggataagaaagtatattagatagaagtgaatagaagatctaagagcgggcataatcacttgttttagtttaatttaattttcaataccttttttttcatttgagacttttcactaataatttacttcatacatacgttttagtctctcatatacacctaaacattgcaatagataccttatacaaatacactactcgtagatcagtctgatgttcattatatagaaataaatatccaaaattaaaagttaataattcaataattaaatcatgtcagatgatgatccaataaagccactttcaaggcgaaattccactgttgaaaattcatcctcaataaaacgtaggaaatcatgtaataataataataataataatatacctaattcaaataatacatcaaataaacaatataaaatactaccaagagaatatattaaatgtgaaaaaactgaacttataacaataatttcaagaatgttatcatcaattgttaaaattaatgattcaagaacttcattagatgttaaatatttaaataataaaaatttaaccagatttcattcaagatcatcaccacaaatttcaatttttaattatttattaagattatcacattattcatcattagaaaattgtgttttaattgcaactgtttattatattgatttattaacaatgcaatatccttcatttgcattaaattcattaacagttcatagatttttattaactgcaacaacaattgcttcaaaggcattatgtgattcattttgttcaaataatcattatgcaaaagttggtggtgttaatataattgaattaaatttattagaagttgaatttttaaaatgggttaattatagagttgtaccaagagattataattatgattcaatttgtcaacgtaaaaattcaactggtaatattgaatttgatcttaataattctttacaatttggtatttcaaatgctcataaaattttagatttatattatgaaaaaatgataagtttatgtggtggtttagtaataataataataataataacacaaacaataccccaaaagattttactaaaattggtcataatgatgaatttatttatacacttgaagaaacattaatattatcacgatattcatcatcatcttcaacaaattcatcatcttcaaatcctcaatcaccaataattaataatcaaagtgtggaaaatattaaaaatacatttaacaattcaaataggaaattatcagagactgaatcttcaactacaaattcaagttcaactacacatacaactacaaatatacattctaataccatttccagttctaacacagattctcattccaattccaattcacattctaattctaattctaatcattcacgaccctccatatcaaatacatcacctaaattcacagtgtcctaacatcttctttatataatacagcttaaattaaataaatagagtagatctttaattaatgtccccttttcccgctcatagcctataaattttttaaccccacacaattttccattttgacagaataatttaatttcaagtatttaaagataagacaagaacgtttctttatgttatagtatgatgcaatactgcttcttataagcataaaaacaatgattgataagttggagaaaaactcttataaaaaagttgaagttttattaaatgaaactaatgataaattattcattggaccaaataacttacttaacaatgattcgattgaaaatattcaattattctctaaacttatatataatcaaaaagatattgaaaaattgaaataattccgacacgttaaccttacttgattcaactgatttaggtgataatccaatatcaaatcatttaattggaattttcacattaggtagaaatttaacatctcatgaacatataattcatggaggtgcaatagctgctataattgatgaattctttgttaaagttgcattaccacttactgaaaataattttgcagttacagcaaatttaaatattaaatatttaaagccaattaaaattgattcaaataatagaacaattgatgttttacttaattgttatattttaaataataaaaataatagaaaatttacagttgttggatcattattgaattccgatggtgttaaatattgtgctggtgaattacttgttgttgttccaagagagccactatagtaatgtattgggatacatgtattctcatgtccgtatatttcggagttttgtgtaatattgtagatcgtataataattataataatgtggataataattgtatattacgtaagtatctgtcaatttttttaggaattttccactgtagagggaaagagagggatttgagttattttggcagttgatcagtaaacgggattgggaattaatttgatttttactttgaaataaggacaagtggtgatgttaagacaatgtttcaagttaattgattgtcgtactagtttatcattttcaaggatcggttataaacctataaggagtgttagaattgttaatcatttaagatgtttaacatttaaacaggaattataactataataatagaattgaaaaatatgatcaatcaattatacgtaggtatagtacagaaccaaataaaaatgaaaaagtaaatgaaaataatggaagcccacagaaaaagaaaagcttacctttacgattcatcaatagtataagtaatatatggatgagaattaaatggatacttattagatctaagagaccttttaatttagaggacataagtgcatttatttcatggttacttacaggtaatatagttttattattaattggtacaacaacatttgtttcattagttttaatgacaatgaatcaattaactgatcgtgattatgttgcagaattaatgggtaatttaattaccaaaaatactaatttaacagtttcatttgaaagtgcaattttacctgattggaaatctggtacaattcaattaaaaaattgtaaatttagtagaaggccaaaagttattaaaattgttgaaaaaattgaaaagaatactcaaggtaaaattataaataaatcatttgaagaaatttatgatgatggtaattatacacaatttgatataacaattaaagaaattaatatatcattaagtttttggagatggattagtggtaaaggtatagttgatacaacatcaattaaatgtattagaggtataattgatagaactcatgttgtttggaaagaagatgatgatccaagaaattataaaaatatttataaaccaggtgattgggaaattgaaaaatatttagttgaagatgttttagttacaatttataatccaaatggttttagatcatgtattttatcaatttataatgcagatttagatattttcagaaaaaattggcttatgttagatattttaacatgtaatcatttaagtggatgttatgatggatcattatttacaattaataaaatttctaattttgataaatttcaagatgaattaaaaattgatttattagttaataaaaaattaggtagggaacaatttagtaaaattcaatttaatgaaaataattctcataaaagagttagatttaggatggataatttaaaaattgagcatttaaataaaggtatgacaggaccatttggatggattaatgatggtacagttgatattttagcagattttattattttagaagaaaatagttacattagatgttttattagatgaaagtattaataatttaagtaatcaattttcacttatcaaaaaatgataagaacaaattaaatgatataaatgttaagaaaaattctgatgataataatattaataatcctaatcataatgaagatttattcatttgtgatttctatttaacattaaagaatccaaaggctaatataccattattcacaaatgatttatcatatatcaataatgcaacaattagaccaattgttggatatattaataataataaaacatttttaccaatacgtggtagaatttataaaaaattaagtgattttgatggttcctggacattttatgattcattactaatggatgatttatcaaaggcagtttatgaaagtttctatgaatatgcagctgatgaaaagttaaggaatgaaagattacgtaaagttgggttctggtcaatacagtttgtcctacagttcatcctctggagtatgacaacgttaggcggatagatactaaaaaaatgacgagcccccttgcttttttattctcacacacacacaataagagagaaaaatttatttttttccgcaattagaaagtgggcccattcacacgttgacggtgcttggctggcattgttctagttagaggttcccgatgcatgttaaatgcaagttctttgcgctttactggggctgaatgtattggtaactagtaaagggaatatagatatgatgcagatacactaagtgacaattactgataaagaatagtagagtttccagtgaaatagaattactgtttatggaaagctgaaataatattatctcatcgtgatcataattatttaaaataattcattattttataataattggaaaaacaggtggtttcattaagcgtttcatttaattaagttttttttcaaagtgttttaaacatctcgtgttttgttttactgtcattccttataggtgattgcttttttttcatttcggttatcattaatccttttttaaaatttaagttataatatagataaaattttttaccaatgacagatgatatttttaactacaatcaacaacttatgaataatgatataactactaatggtaacagattaaacatgaataataccaataataatactaataataatgttaatgatcatgctaataatgataacggactcctttatccgaatgtgtcatcatatgaaaacgttcaacatcaaataccggtaggttatccaattaatcaacaatcagtgacagaaaatcaatcccatataattaatccaaatcctaacattaatcctaatcctattacaaattctatatcaaattctatttcaaatgctatacctgttacagttacaaataaaaatacaaatataaatacaaatataaatacaaatataaatacaaatacaaatacaaatacaaatacaaatacaaatacaaatacaaatacaaatacaaatacaaatacaaatacaaattcttatcaatatacaaaattaccaatggtatcgaattatatgcaaaatccaccaattcaacaaacaaataatataccacagagaacttcaagtacaataccaaataataattactcatattcaaagaatcaatatagtccaaatattcatagaccttcatctgcaccaacaggtgtcaattatccaacttatatgattactccaacttcagattcaataatatcaaataatcatccttcaataatttataatcaacctattgattttaatcaatcaattaatacagcaccatcattacctaaatacatacctagaaaaagttttacaagtgggaattttcattcaacacctgctgttccaacattatctaaaactaatggtaaatcaatcacttcacaatcaaaatcaaaagcaagatctatatcgataaattcatcgattgtaccatcattacataaaccaatatcaatgattgatcaaggtactaataggaaagttaaattagaatataataaagtaagtaaattaacatatgaaatttcacaaaatatgattataccaccatttaaaaatttaaagccaagttcaaaatcattaaaagttgagaaaccaaagagaagtaaacgtcgttccaaatttagtaaagaacaagatgaactaattgttaaattaaaggaagagaataaaagctgggttgagattgctgaaattgctaatgttgatagttatttagcatgcaagaaatagatatcaagttttaattggacaacagggaggtggtgcaaatgaatgtggaccagatgaaattaatgtattaaaggaaattgttgatgatggagaaattgaaaagatgaaatatttaagtaaagaatttgccaaatgtactggtaaattatgttcttataagcaaatacgagaattattaagatatttattttggaaagatccaaataaatttgatgttcatgagaattacttgagtgaattacagagattacagatggagaagaatggaggagtttgcaattgaaggtgaatatgatgacaatcataatgatgatagtgtagataatagataatgtatagataatacataagtaagataagataggtaactataagattataagataagtcttcgagtaaatctcactgtataattctgaaaggggaaataagaaaacattggtaaaattgacgagcccccttctttgttagcatagaaattttattagtgtggagtgattgcatggttgcttttaatttggttttgataggttattcttttctattttatacagcatctcttgggaacattaaggatagaaatagtaatggctgtagcttacgtttctttgctacttaatgatgaatatttatctggtgtacttactctagttaaatcattacatgataataattgcattcatccaattattttattattttcaaaaaaatcaatttcctttaaaacttataatattttaaattcttccaaatatttccacaggttggttaatattgataatgacttaataagcagtaaaaatggtgaacttattcaattatgtgattatcttaatagaaaagatttaaaatttgcattaacaaagttaaatgtttggaaactaattgaatttgagagaataatttatttagattgtgatatgttaattaattcgaaatattgatcatttatttgacatttggttaaatgaattaacggaaaatgatataattgcatcatctgattcaggttggccagacattttcaattcaggtttatttattataaagccaagtattaacattttcaataaattaattaaatttcataaagaaaattattcatttgatggtgcagatcaaggtttagcttaatgaatattttaatttacagactaatataactggtggtaattggtatagattaccatttacttataattgtacattaaattcaaattatgaatatttacctgctttaataagatttaaagatcaaattaaagtgtttcattttattggattaaataaaccttggaaaaattttaatctttgttttgataataattttgctaaaatttttgaaagtaaatcatcaaatgatttggagaatttatatgaaaaatggtgggatacatttaaatcaatccaaataccaagtattacaccacttgaaatcttacaaatatctaataatattccaacattaaaagaacaattattaccaccaacaatcttggttaatgaagaaactacaactgaaaaaactaaatccattaaactgactgctccaactgaaataatcaatccattcctttcaccaactaaatcatcatcatcatcatcatcatcatcatcatcatcatcatcatcatcatcgcaccaaatcttcaaatattcatttcccaacttattattataaacatccaaattctaaaggaacggatattaaagatcaaactacatcaggtgaagcatggaaaatgtcagaaagtaaaatccaatggcctgaaactcaaaaaaatatcaaatcatcaatattaccaccacacttaccaacatctcctccaccacaaaaagaaattaatattgttgatgaatatgttaattcacatccaattttcccatgggaatctaaaaagaaactgacacgtacttttgataataggtgttaaatatgaacctccattatattcaattcaattaacaaattcaaaagaagataataacaataatgacgataatgatgataataaactgataggttttgacgatggtaataaatttgatcaatacctgcatagaattgaacaaactaaaatgcataaacgtaataatagtggagttactaaaaatttacataatgaagttgatttagatgataaagttgatgaagaaatagaaaaggtacaattaactgaaaaattagataatatgaagttgaagcattaagtatgagtaaggaatatgctaaagttgtagatgatatatagaagaggatgattatgattatatttgaaagaatgtactattatagatgttgttatttttgtgaatactaattattctttatttttattttcttttctattctcttttttttaatatacattatttaaatctatatggatttatcattaacaaagaaactataaagttaaataattataataaacaatcaacaataatccttaataatgtagattagcaaatagtttaggggaggtattcattatgagattttaaagaaaaagaatagaatattaacaaatagcaatgatatggtataaagatgtattaattattataattcattataattattgttgagttgcttgaggcatttgagaatttctagctgaagcattttctcttaagaaagttaattgtctagttctaaaagtttcataatgaactaaacttgtagtttcaattaaatcaaataaatgagttcttgttaaaaaatctcttaagtaaacaaattcacattgagtaacatcttcaacattaattaacccccatttagttcttctacctctaatagtttcaccttcatcagttgtaattatattttcagaaccaataactgcaaatggtaataaagatctaatatcattattaaattgaacttcatcttcagttaattcatcatcataactattttcataaggatacatttttaaattataatatttaaattgatcttgtaaaatttttttaaatttagttctttcatctaaagttaaagtatcagcttttgcaataattggtataacattacaaacttcagttaatcttttcaaaacttgaatatctaaagcttttaaaccataaccatttggttgaataaaatataaaacacaatgaactcttgtatctttaataaatttttcccttgaagcatttaattctcttcttaaaaattgattttgttgatctttaatatattttaaaattggttcccaagatttatcattattaagttgatcaccaaaacctggagtatcaattaaatttaaatttaatttaacattattttcaataagtgaatgtgaggtaactttaatttcagttgttctatcaacaggttcatcgatagtatctctaccattagaatcaaccatatgagaactgaaaagagtatttataagagttgatttacctaaacctgaataaccaaccatcataatattaaatgtaaaacctcttttaactaatcttgattcaatttgagttgtaatagtatcaaaaccaacataattagaaggatgagagactggagtgtccccattgagagtggtattgttcatatgaacactattattgaggttattatcacttgcagacattactttaaagaagaaattccctttgtttacctgagatcaatgtccaaaatatttaacatgtcgtgtctcattataataataataataatatttgcccatttccaaattaagctaaataatatttttaaaaaattaacggtcgtcgcgactttccgattaatgaaattttcatatttttttcataactattacttataccattcgtcgatttcatgtaataattacagtggttagttcttgatatctatattcttaaggacaatggtctctgctttacttccctccttacctgctgcaggtctctctgctcttctaccccgtcttccatctattagaattggtgttgcacttccttcttttttacaacctacatcaaatgaaaatacaattgaagatataaataataataatgaattagattcaggtatattacgtgcagctccaaagaagaaaacttctcatatgaagagaagacaaagattgtatggtcctggtgataaacatattaaattaaaggataatttaaatagatgtcctgcttgtggtcattataaaagatcacatttcctttgtatgaattgtgttggtcaaattagaaaatattggaaaaatagagatgcaccagctccaagagaagctgaagaatttacaaatcctttagatgaacaaattatttatcctggtaaaactgaaagagaaagtgaaaagaaattacaatcaaaggattggttagttaaaaaacctaaaactcttcctgttgaataatttatatactaatatattgatatattgatatatcaattatattattatacatatatccatttatactctatatagaatccaacatgtacataaagcatttacattaaccatttcattacattggtataatatttcaggctgtgttacgtaacatgaattttttttccttcaaaattattttttttttcaaacttcactatcggaccatttttaaatcatcttttgaatcaacttttcttacttacttctccttctttacgagcaaagtttatctatatttatcaaagaatgactgttgaagataatccacagaaaagacaaaaaactcatattttaaacacacatttattagcaaaatcaagatcaatttcttcttatcatcaaaatttaccaaaacatccattaggtattaaaccatctgcaaatataatactttcaaaggatacagatttacaaaaaattaaacattcagcaggtgatgcttttaataaactctcagatgatataatattaacaattttaggtttacttgatcgtgatgatttattatcttgtactcaagtttcaaaattttggtatgcattctcaacatttgatgagttatggagaaatatgtatacacaatcaacatctgaagaaagaatatcgaaaaagataacttttgatgaatggaaaggtagttggaaaaattcaattttacatcataaaagtgatccaattgattgtaccggacttgtatattcagatgcattatttacaccatatgcaaattcttgtattgattatgaagatattttccatgatataattatagaacaagaaaaattaagagatatcgatggttattgggatgccaacattttaacaaatccaagtaaatttccttatcgtggtagaattccacgaattgatgaagaaacttttacctatgaaatgtttgaaaaaaatcattggaacgatcatccatttatacttggatctaaaaaatataacaatggagaacttaatagatggccaaaatggacaattcaatatttacttgaaaaatttccaaatgttaaatttagacaagaatcagttttatgggaattatcactctatgaagcatatgcaaatgaaaatcatgatgaaaatccattatatttatttgattgtagatcaaatgcaatgaaagatttattaccatcgggatattatccaaatccaccaatatttgctaaggatgatttatttaaaattttcaattcgtgtcgacctgatcattcatggttaattactggacctcaaagatcaggttcaacatttcataaagatccaaattcaactgatgcatggaatgtagttttacaaggttcaaaattatgggtaatgttaccacctggtatgaaaccaccaggagttttcgtttcagatgatgaaagtgaggttatgtcaccaaatggtttagctgaatgggttaaaagtggattttggaatgatagtatacaaattagtaatgatgcaacattagatgataatgataatcaatttggatcaggtggttttagaacttgtattgttggtataacatttgaaaatgaatgtatgtatgttccatcaggatggtggcatacagttattaatttacaagattctgttgcatttacagcaaattttgtaccaccatgtaaaattaataaagttttaaaatttatgaataataaacgtgatcaggttagtggatttagacatgatttattacaatttcaattaaatgaatttattaaaaattataaaggagatgaaaatgaaaatattaaaatattaaaagaatatttagcaagggaagatctgaaaaataatgatgaagatgttggtgaattaaagggtactggatgtatgccagtttttgaaacatttgttgagtttttgaaaattaatggatatgaagatttacttattaggggattgaaagaaatagaaatggaaaatgctaaaattaaagagaatgagagagagaaaaagtccaagatttgggaggatttaacgaagcaagcaaaggaagaatcaacaggatttagttttggttttggatttgatgatgatgatgaataatgatttataaatatggataacgataaataacataataaaaaaaattcataacataatataaacaactctatagatgaacaattataaaatttataaaaatacagatataatttctaatctctaataaaatatctaacttttaacttttaagtattgaactaacagtttcgtaaacacctaagaaaatagcaccaccagcactaatccacattgttcttggaccgataccactaaataaaacagaataaccttcctcttttactaacgttttaaataatttaatgattgaaattctttccttatttaacattaatctagttttcaaaacatctaaaggagttgtgattgcagctgcaataccaccagcaaatgaaccacatagagcaccttttaatggagaaattttttcaacattttcataatttgcccataaagattttaaatgttcatataatgggaattgaataattgtaaatggaatttcacgcataattgttgttgaccaaccacgatataaaccttttaaaataccttcacctgatttatttgataaaataaatttaaaagattctaatgatgaattaaattgtaatgattgagtacgttgtttaataacttctgcaggtacacgtactaaacaagcagcaatttcacccattgaagctgaaatcatatgagataaatgaattgaagttgaattttcaatatttggtaaaataattggaattttctccttaaagaaagatttacaattatcataagtaatgaaaaaataaagcagcagaaggtgcacttgcaatgactgcactacctaaacctttatataaacctttaaacccaccatttaagaaaaatccacccttagcttgtaatcttgtcttcagagtatcaattgggaaaaatgctaaatcagtagcagttcctgctgcccctccacttattaaagataccataaaggcattatattttggattagaggatggagtggatgaagacattgtctataataaaataattcccaatcaatcaatccatcaactcttccgtcaatgaatcattggattgaaaaaattcatgttgacacacacaccgtctcggagataatataatttataatctctctcggagatagggaaattaacctaaatgagggggataaaaataactttaaaaaatttcactctttggaaaaatcaatgattatatcacttggataagaagttgttaattattaatcattgaaattgttctacagattttcttttgttctttttcgccttctctttattctctctccttctatcataaagtaatgtctaggtgtcttgtttaatagtgtaaagaaaagagtacagagtgtacagtcaattctcatgtataaaacgttggaattcttcaattactccacctgctggatccacagtttcaatgaataatttgaaaattggtgattcaaagcatggtacaagaccaatttatttagatatgcaagcaacaactcctgttgatccaagagttttagataaaatgatgcaattttatactggttattatggtaatcctcatagtgcaactcatgcttatggttgggaaactgaaaaagaagttgaaaatgcaagagcttatgttgcacaagttattggtgctgatccaaaggaaatcattttcacatctggtgcaactgaatcaaataatgccgcattaaagggtgttgctagattctattcaaagacaaaaaaacatataattacaactcaaactgaacataaatgtgtacttgatacttgtagacatttacaagatgaaggttttgaagttacttatcttaaagttaatgaagatggtctcattgatttagaggaattagaaaaaacaatccgtaaagatactgcaattgtttcaattatgggtgttaataatgaaattggtgttattcaaccattagaagaaattggtaaaatttgtcgtaaacataaagttttctttcattcagattgtgctcaagcttatggtaaaataccaattgatgttaataaaatgaatattgatttaatgtcaatttcatctcataaagtttatggtccaatgggtattggtgcattatttgttagaagaagaccaagagttagattagatccaattattaatggtggtggtcaagaacgtggtttaagatcaggtactttagctccacctttagttgcaggttttggtgaagctgcaagattaatggttaaagaatatgattatgatcataaacatattaaaaatttatctgataaattagttaataatttattatcaattgaacatactcaattaaatggttcaaaagaatatagatattcaggttgtgttaatgtttcatttgcttatgttgaaggtgaatcattattaatggcattaaaagatattgcattaagtagtggatctgcttgtacttcagcttctttagaaccttcatatgttttacatgctttaggtgcagatgatgctttagctcattcaagtattagatttggtattggtagatttacaactgaggaagaagttgaatatgttagtaatgcaatgaaacaaagagttggatttttaagagaaatgagtccattatgggaaatggttaaagaaggtattgatttaaatagtattgaatgggctggtcattaataatatttatattaaaaaaaattatatgtgtataaacggtttgtctttatgtataagggtgtctgttataatgaaatttaaaaaaaaaacaatgtattcgattatataatgtataaatgaacataatgaaacgattttgaaggtataattaaattaaataagggattttgaaaagaatttgaaaaaataatgctaatgtaaattatgcttggatttaactatgtgaaagaattgtctgagaaattattctttcaataattaatgtagtgtattagatagtgtattagattgataattaagacatgattggttaattgttgtaatatatgggtatcaaattttgtttatttggaaattattagtgtatgtgaaaaatacttttgattatttgttaatttgtttgtttaacaactttcattaattcattaattcattaaagttatatattattatcatcaaatttattcattatcacttaaatctggatttataactcttaaaccacctttatttgaattatctgtatcactaccagctgctgcatcaggtaaactgccttgactaaatcttctattacccataccaatacttatttcatctggattatataaataagcaggtgttctaccataaccatctaaaccatttattcgtgaatcaattcctaaatgattatcacgatgaattgataatgaatcatctctaattgatttttcatcatcatcaaaactattatctctatttctacctgcaatacaaaataaactaattccgaaaaaccataataaaaatgctgcaataagtaaagtaccaacaacaacaccaactacaatacctgcaattgccccatgtgataatccaccattagatgatttattttgattaccaggtgtatttgaatctgtgatagagttagtgttagagttagaatttgaattagaatttgaattagaattagaactagaatttgaatttgaattagaattagaattagaatctggtgcagaaccggatactgatggtgcaattgttgcagttaaaacatgagttgcggttttaatttcaactgaatatgatgtgacactttgaattatagtaactaattgtctactagaattatcatttgatgttgtaacatagaatgaaggtaaaactgtaactctagtaactatttcttcactttgtgaagtggttgttagtgtagacgatgaagtggatgatgttgacgttgttgttgctgttggtgttgtagatgtggaagtagttgatgaggtagtagttgatgatgatgttgatgatgttgatctggtggtagaggatgatgtagaagtggttcttggagttgttgaagttgaagttgaagtagaggtgggtgacgaagtcgaagttgacgatgatgttattgatgatgtagaagaagttgattctgaacttgaagtttctaaacttgtatcactataagatgaggaaggatccctggaaggatctaaatataccatataataattatctgtaccaccacatttttcttgaggaaaacctgaacagggggatgagcaaaaactagaatcaaccatagaggaagtatctacttcactaccacaataacattcatcaccattagttaatgcaataacataattccctaaacaagcatcttcacaataaccagatgattgatacatataagtattttgaaaagataaattatcgattgcagatcctgggaaacagcctaaattctggtagccataattaaatgcaccaattgctgaatgtaataggaataacagtatcagaggtagccttagtattgagtatggcatctgagtaacgaatgtgaatgaatattgaagagaataaataaatgaagggccaaggagagagatcgaaatcgaatggattgaaattgaaatcaagtgaaatcaaaatagaaaacaaaaaatgtactacagaaaagaaattaaattaaaataaaaataaaacggaagaaaaagaaaacaaaaacaaaacaataggaacagcgaggaaattttggtgacatcagttgttgtaatttattattattattattattattactatttccttctctagacttttattttattttatattcgttttatattcgttttatattcgttcaataatgtttatatagtggttatatgtagtaatagtcattataaatatagcactgatataatcactactttaataattttttaacttcagctgcaactgcatcaccaacttctgtagtagtatttttaccacctaaatcacctgtcataataccattatcaagtacattcttaacagcttgttcaataattttaccttcttcaagtaaatttaaacttaattttaacatcattgaagttgataaaattgttgcaattggattaactttatttttttctaaatctggtgcagatccatgacatggttcatataaaccaaatgcttcatttgtatcaggtaatgaagctaatgatgctgatggtaataaacccaatgaaccaggtataacacttgcttcatctgataaaatatcaccaaacatatttgatgtaataacaacaccatttaatttagttggtgatttaactaaaatcattgcagcactatcaactaattgattttcaacttttaattgtgggaattcattcttaattgtttcttcaacagtttttctccataaacgtgatgatgctaaaacatttgccttatcaactgaccaaattggtaatggtggattactttgtaatgcaataaatgctgccattcttgtaattctttgaacttcttcaactgaataagcttcagtatcccaagctctaccattaccattatcttcctctctttcaccaaaatatataccaccaactaattctctaacaattaaaatatctgtacctttaacaatattactctttaatggagataaatctaataatttatcacttgcaaaattacatggtcttaaattagcatataaatttaattctttacgaatttctaataaaccttgttcaggtctaactttacctgtaccccattttggaccaccaactgcacctaaaagaattgcatctgcctttttacttgcttctaaagcttcctttggtaatggtacaccagttgcatcaattgctgcaccaccaataagatgattttcaaaattaaatttaatttcaggtttaacttcactaattgcatttaaaactttaacagcttctgcaacaatttcagtaccaacatggtcacctggtaataaaacaatattctttgtaacagtcattattatatattctaattgatatgtgtatgtatatctatagaaagataaaacaaaaggttacatatacatatacctataactctattatcaatcgtccaatacctgcatgtagtctaagtggaaaatctgtcatatactagtaaggcctttatcggcccgttaacgggagtttttaaattttaaatttttattattattattacgtaataatattctaaatagtcgcgtctgttaaataattctttgattacgtaataatgtatatggatctattatactcaaggttttataaactgaaactaataactaaagagaagatatttacacaacttatttttatagattaaatttgatcaagaatgaaagtatcaatatcaacttcatttaatggtgcatttcttttacttgatgcttgatattttttactttcttccttttgttcaattctttgaagtttacttaatggtccccatcctgtaactggttcctttaatgtaaatggttctaaaaatttaacacattctaaaaatgattcacctaatttgaaaatttcaaatataatatcttctgtacaaataactccaaattcacctaatttttcttcaactaaattattatcatttaatggaataattttataatcatatccttcaactaatttatcaatattttcttcagttttattattaactgttctatcttcttcattaataattggaactttaacagttgcacgtttttgaattaaatttctaactgttgataaacttggtgtaccaacaacaacatatggattaattaaatgtaataatggttcaactttagaatttaatcgtacaaatgtaccttgattaactttatttaatcttaaaatatttaaaactttacgtgctctagttggaatttctcccatatatgaagttttaatacgaacaataaataatagacgttccttttcttcttctttattttcctttgtatcttctgataatttttccttaaattgtaatttatcaaattttgtaacacgtttaattctctcattttcacgttcagttgctaatttacgtgcaacaatactttcaacacgtataaatttattacttgcctttttctcattttgctttcttaaacgttcttctgcacgagttcttgcttgttgttgcttttcaatacgtaaacgatcaacattcttacgtttctttaataaaatttcaggattagaatttaatttcttatcagtagattgttcagttgcactcatattgtgtgttaaatgaattataaagttcaaactgtatatattacacaaagaaaaaaaaatatttcactgttaaataaattaaatttgttaaaatagattattatagataaaaaaaattttttaaggtgaaaaattaatttttcttacctcttcttttagcgcgtctataggtcggtatacacatcaatctatactgatgtggttgtgatttactctcatttataagacctttactacttgtttccttaatcaaagtaccaggatgataattgtaaactggttcagcttctagtctttgcactcttttaccaatatctaataatgaatctttatctaatggtttttcatcatccataattttagttaatgtctttctcaaaaccttacacatttcaccactatatttatcctctaataaattgattaacactctactcataattaaagtaccacaaatttcaagttcctttggagtcatttgactaaatttctttgcaaacctttcaatttctgaacctaacaattcaccgacatgataagaacccaaaccacatctagatagatgttctaaagctgtcttgccaaataataaatcatttaattcaaccactctcttattaacatcatcaacataataaagagaatcggcatattgatagcaataaaaaatcttcagtgatttgtacgctgattcattgtttaaaacatcaacctttaaattttttgcaatcttttcacctagttctttccgaatttcgaaaatattattatattgaagagcatcatacaaaccacattgagtaaatatatattctactattattgcgaactttgaactaaattcaataattgattgttttggtaaaatatcaggcataatattcaaattggaataattaaaactaaaaagcttgaaatctttttcagttgcagttttgtacatacgtttatataccatcctagtaataatatcattaaaatggtataataatatatactcttcaacggcttcaacccatttgataaagtttgctccttgtttgtaaaaataaagtcgttcctcattaatatttatttgaacaatttctaaatgttgataagccctctttaaagccatgttcgcattttcagcatctgaaactttggaaactggtacagatatagtaattttactacctaaaggggtaactacttcaatttcagtaagtggttcttgggaacctgtcatttcgatattatcatcagaattagcattagcttcaactgtggaacaatttacatcaggagcttgtatcaaattcaaatttgattgtacatcatgagcctcagataaagaaacgctttggttgctcttgctagtttggttaccactttctgacattgactgtaatttagttgactaaaattgataggatatgaaatacggaataataaacttttaaaatattcactcttaatctacacaactataaaataatcgtggcggtattgttaagatagtggattgtattaaacggtataaatctctatgtattagaaagtaagtcaaaagagaataaagaaagaaagaaagaaaaagttacataacggtaattataagcgcatgggtttttcaatgatttaattagaatttatataatagtaaagctagtataatctttcaactttacctctgactgatctacgactagtttcaatatcaacaatctctgtaatatatttatgccatttcattgggaaaactcccttaccaaacctttctctggagacataaattgcattctctcttaaaatcttcttttcatcttcacctaaaacacttgcactgagtaacatttcagttaatgttggatatttctccatttcagtaattgatttattataatctggatcagtctcatctttgaaaaataatccagatttactattaaatggtaatttaacagttttatttctctcttttctacttaatattttaccatcaattcttggtataacaatatcttcaaatggtcctgcacttgaatgaactaatggaattgctccattaaacatatattcaacaactgcaataccaaaatgttccttccacatacaattaataccataatctgacttttctagataattttcaacagtttcagttggtgcatttagttcaaatttaattaatttttcatcaatttcaaattctctaactaattcctttaattcattaatatatttctcatctttcccttcacgtactgatccaatgaaaattaatttatgtaattgaatatttggatttcctaattcatttaatttatttagatattccttataatgtttaattaataatttatgacgtttttcgggtctaaactgtgctaaataaacaattgttctatctcttttaacatccattaatttcttcactgtaattttctcaaatctttcatcatcataactaacacatggtggatataatatatcatcctcaacatcatctacttcttcttttttcttacccattccaatagctgataacacattttcgcaagtccatgtagaattatatagtgcagtatcaacacacattatattaattgaatataattttaataatacccaccaataacaatatttgattaatccataaatactacccatattctttgcagcattaagcatatctctactgactgttggataatgaatataacttataataggaatatcaaaaaatccaaaaacgatggaatagctgaatggaactcccattgtatcaataaaaatatcaggtactaattgataaaatccaattaatactaaaattatactaccaattgcttgtgatataatacttaaaaatttaaaataaactccattaattaaccattgatatttatcaggtaaatgaataaaaacaattctatctcttaattctggtctatcttcacttaaaaatttaattccaaaagttttatcaacattttctaaaattgaaactgctgatgttgatgtagttggtgtaaatgtataaataactgcaatattattaatatcactctctaatgttgatataactgcttcccataaaaccttttcgcctccacctgatgcataactaaaaggatgaaaaaatccaattaattttctacgattacctgcatgaacatcaattggctttatattaatcaaaaaattatatcttgattcttcatctttcctatccgctaatgggacatgtaatttataatattttgaatctaaattattaacagtttcacctttggcatctattgaatttaatggtaatgttgaacaactttgtggtttacttgtacccataattaatcttctcctatatgatgattttttaacaccaattttaccaattggtaaatttccatttggtttgtctagtgcaactttcaaagtatctctgtaatcagttggtggtaaaaagaaaaatctttgagtgaatggtctaccacattgataaataatataacacaaaatgcatattgctgttggtatagaagtaatgtgtgaaagtaatatatctttcacggaaaaagttgataaatctatcttagactgtgtttcaaacacattgaccatcttgtcttgctgattgtgaaagaaaaacaagtgttgctatttagaagtgaagaaatacaatcattataaaggttgaaatttgatatctttacggaatttacctttcggcgatgtgcgtgtccttaatctaaaattgatttttgataataatgattattatataactatgatagaaaagatacttttataaataatactaaattaataatataaaaaatggataaaaaatgttatgaatatataagaaaaatagtttaattcaattgaaatcaattgaactaatgattttcatcaatgcttaattcaccaactttttcatttactttctcaatattagatttaccatttggaattgttggtaaactattattagaatctaaactaaaagttttaccttctaaaggaacttgctgtgacaactgtgaaggttggttagtttggtttggttggtgttgttgatactgttgtttaactgaagaggttaaactaaatgctctttgttgtaattcacgttgttcttcaagtaattgtcgttgcttttgttctaaaattgcttgttgttgcaataataaattttgttgttcagcgagtgattgtggtgaagtatttgattttgggtcaacttgtgatgaaagattatttgaagttggatatactgtatttaaattaccaatttgaccttgattatgaatttgtggattatgtgacatatccatttctgaattttcaggtattgtcattcgctttgaattatcaatttcatgtttaattggaactaaaacaacatcattactatctaataatcccatacttaatgatgacataccagtttgttgacgtgataaatcattacttggtgttgacatttgtgttgaaagataatttgatgttcttactatcaatatgttcaggtactgttgagaatgtagtatttgtattattaattgtatgattatcattgtctgtacttgttagtgctgtagctgaactaacaccacgtcttctaccagtaattatacttgcacttgttgatgaatcaccaatattttgtgatctacgaacacgctttctttctaaaccaattgatgaacgtgcaacagggacttggtaattgtgttacccttttaatatcattagtaccatgacatcattaaatcataactttcagctctgaaaacccaattatgacctttattcaataaacctgtacctctaccatgcattataacaaatttatgataagaatttggattcttctcatctttacgtgaatgttcagaaactgataattcaccctaatgataatgatctttcaggtaatggatctttcttacgatcggatgatttgaattcatgtaagaaacatggagttaaaacataccaagctctttgataagattttaaaaatttggattttctttcaagccaacctgatctaatttcatatgtcaaagattcattttgatatttataacgaatttccgatgctctacgcattggtaaattcagttcaataaaatttttattatctctatcaataaatgaatcccattctaatgcaggatcttttgttaagattgttgaatccattttagaaattaaagtatcaaaaacattttgtgcttgttggcctaataattttgcataaactgttaaagcagtctgtaattcaatacagacaactttttctaactctttaccagaggtttgaatatttataaatgcttcatgaagataattttcttcagtaagttgacgtctaattgatctatcaagtgcaaatttaattaaatatggatcatttttcggatctaactgagatgattcaattttagctgagtcgattgatttaatataagttgataataatcttgaagtttcagattgatatctatcaacttgattcctaaaatcagtttgtaatgatctaatttcctttattttgactaataaatctcttttcaaatcttctaacctaggtattatggttgtacttaactctttaacagttgtttgagctaataaagcagagtttgaatggtattgataaagaattgttggtaaatcttgaattgaacctgaacctaaaggtaaaaagaattgtcttgctaaatcatattcacttggtttattagtaccatctttattttcattactattattatttgaaaatgatgaatctggattaaaattcaaaattgatgaattatctttagctgaatgaaaaaagttaaagttattaccattgttattattattattattattatttgtatttaaaggttgataaaactcaccatctaaaccttgagtaataaatggaaaactaattgcatgatgaagtctaacttgctgtcttattatttcttcatgaacagcaacagattctttcaaataatgagaaagagcagagatgatgattctccaagaattgaatcttgatgctaaaatttcagtagggttagcttttgtaggaacagtaatcaaaagagggttggaaaattgtgctggtgttggaatttgtttactgttatcatttgcattaattttattactcgtattattagtattatttgatctaacatcaatattattatcaattgttcctgcagtagagccaatattcatactagaattaggcattgcactattatttactgttgcattatttgagttgtttgtatttatatcatttgcagttgaaactgaggacacgatagatttagattgttgagcttgctttgaacgctgactatctaaatgtttcagttgtaattggttttgtagcagttgttgctgtgataccagactcattgcgattgatgaaataggaatagaaagaaacaaaggaaagaaaaaaagaaagaagaaacttattgttttatatcagtcaacttttaaaacttctattctgttcttttacttagccactaagtgcaagtcatcatgatggtactcactccacaaaaaatatttttagctttcccctcagtcgcgtctgcttggttttctttttttttgcgggtctttcctatttaggaagtattctcgataacataattcatttccgaatttattttgttgaattgataaggtaaccgataacactatggatgattccttatcgattgaccatttaaatatcactttaatttccgttgtatcctttaatattttattttctccttcacctttttttctttttgtctgttgttcaagcaatgtcaaaaaacgttctcatagtcggtgctggtgtagttggactcaccactgcaattgaattgaaaaataaatataaagattcagtaaatatcactattatctctaaagatctacctggtgatgatgcagttttctacacttctccaaaggctggtgcacaatggatttcttcaaacaaaaaggaacaaaaagaatggcatttggtaacataccacaagcttaaggaattgtctaaaattcctgaaacttttatcaaaccttatcctctatatatgggtgatattgttccaaaaggtaaaaaggctcctgaatatgaagaaccttggtttaaaaagtatgttgatggtttccaatatttaggtacagatcctaaattcccaggtgttgaaaatatttattgttttgactcttacactatttcaaccacttattaccttatctatttattatcacaagctcgtaagcttggtattcatattcaaagacatactttgaaagctctcaaagatgcagaaactttcaaattaaagaatgattcagttgcagatttaattattaattgtacaggtttacaatataatttcctatctgattgtcatgattctaaattgaaacctgttcgtggtcatgttatagttttagaaaataatctaccttatcaagttaattttgaacaaccttatttaccaaaagatgcaaaggacggagaatttttaatgctttttccacgtcctgaaggtggtgctattttaggtggtatctatgataaaaactttttaaattacgatacttcaattgacaataattatgttaaaagattacttgaaaaggctagaacctatttacctgatttattaaaagatgcccatcatccaaatgaattaaagattgctaaacatgttattggatttcgtcctgaacgtcaaggtggtgcacgtattggtgttgatccttcaaatcctctagttgttcataattatggtaatggtaactcgggttacattgaaagttggggttgcgcaaagagtactgctgagttagttggatcaattttatttccttctccaaaactttagtttttaatagtttaaatagatttattttagactctataactttttaatttattgatctcttattctatattgctcgtttattttactgattcacttttttattcatttagtaaatgtctaaatttaattacggaaataattgaaagaactttcattaatctccaaaatctatgattttcactttttaggtggctcagccaaaatatttttttgcataaatacttagtttaactgtttgaatactcttaaacctctctataactactattggccgtaaaaaacactcaagttgctgattccctttaatatatattattcagaagtgaatatagtcaatgatgtacctacataaataattcaggattgttcaaacacaacattttttttgtcgtttcctagattttttacaattgactcgctgctaccaaaatatccgaacaaatttgctatctaaatacactttcttacacttttatacacttttgctttatcatgaataataatctataaattaatcagaatataaaatagtcaacaagcttattttaaaaaatattaaattacttggcaaataagtttacacccaacgctggttgaataggactatttcctaatgatcctggtaaatttgttggcgaacctagttgcatcttaatgctgtcaggtctcaattgaatactgctaaataagccatgatttgctacatttttgtcttcatcgacctcgtttacaaaactatcattatcaactttttcttccactatgttcttttttacttttttacgatcagtattctttttgactaaatccttgtccatttcattattgatcttcagtttttcctttccactattgtagttttctccgatattctccatagtatcctccctatatttaagtataggtgtcggtgttatgatttttggtttaatagtctttttaatggttggttgaccacatgttgtaagctcccaacgtttcaatttatcaacatttgcacaacacttgtaagtgatcactaactaattgttgctgtaaataacataataaagaatatatttttgttggaggattttcagctattgcatcagcaattacattttgtaatagatgcggagatggtggcattgagaagaatattaatacttcttctaaaagacttgttctaaacccttgtaacaataatgtaattatgtttttgaacaatttagtttgatttggaatatagggttccatttttaaacctttgaaaaactcttcaaattttgtactttgagttattgaatacttccaacaattaattgaatacattataattgtttcaacaaacgcactttgtatgactaaaggaacttcatttgaaatttgattaacaagattaaattcaatcatgttctctattaaaataccataggcaagcgtgtaaatatatggattgttgtatttttttaaaccaaaagagaaagtaataaatctgagtaatgaaattattctaatggaactatgctgtgcttgatccactaatgtgattctaatatctgttaaaattgagtttcacttcttcaatactagtggctatttttaatggtatagttgggaatattaaatctgtaactaataaatctccatcttcataattatattcaaacatttgatatgtctttataggttccaaatcaatgagctctttaatactatagacaatctttttactgtttttacaagattctggctctagtaaagtctcagaataaatcgatgtatttgagctagagttaataaatctgccaagacttgttgatttacataattgatcttgcttttgctttctttcaggccttttgctagaaggtttacttcgaactttttgattgtacaatctcctaattttttccttttgctctgcagaattatcctttggtgaatgttcgctatattcactttcatcttcatcaataaagcttaatgctgagttttgttttattggctttgagtgataatgagatttattgatagaatatccatttttagtagaaaaagcggaaataggcaaagttttcaattcattagttgtaccacttctataatgcatagatatcggctttttaataatatcactatgttgttctatgtcaaaccttttttcatgaaatggcatttcttttaaagtttcttgacttgatccagtataaacaattgctatttcagaatcactcaattttttcttgctgttcatcattaaaatatattgtttgtatccaaaatatatgaaaagaagaaaagcagtcatagcaataacgaaaacaaatattaaaattgatcctacagccaatttcttatctggatcaacagcagtcggaacaaccatcacaacttcttcactcttatcgttaggctcctgcaatgtttctggccttgtcaaatctgctactgaaaataccaaagaattttgaccattatcttgatttatttggctttgttcctttgtgatttgcggataggcaattactctactattcttgttacccgctatttcaaataatggttcatgatgtccagatggagaatccgaatagagtggtttctcccaaatttaaatacggcatttctttgagttatcctaaaccaataaatcaacgtaaaaaacaatcagagttgcttttcaatttgtatggttaaaagatataagcaaagactgaaagctttaataaattaaagtttcttggtttaaaattaaagaagcagctatcagataagaggaagatatcatctttcaaataaaaaaacataaagtagggattgaaaaaatacttaaaagggcacttttctaatcagataattatgttgattcaaaatcttttgaagtacattaaaaattgttatttactatgttataccgccatatagattaaaagtcatataaaacaagaaaaataatgaaataaaagagatcaattacgtgcaatgcctaagtcctgataaccagaactgaggaaagctctatctatataattattccatttctttaaaaccttcttagatgggccttttaacttgtcatctttacctttgcctttacctttgcctttacctttgctttttacctttgtttttaccttcaatcttttctttatccttcctatggcttttcttacctttctttttttcaatcttggcgtcattctctgtgttatcattaacatcatcatcagcagtaacactaccaatctctataggtgcagtcttggcataattacgacccatcttaacccaatctttaaccagtaatgtatcagcttcctcatcagttgtataatgaacatcatacgcaaattcccaattttctacttctttcttggattttttatgattgagttcatttaaatcaatataatactgaatgtatctcttaggggataaagtctgaggagtataagcaggacccaaaggtaaatcttcaggcattatctttggaatagtcttatcattttcatatgacagcaaagatttaaattcctcagttttgaagttattttgatcattttctagttcaataaataacttttcaagtttagcttcgttatcaagttgaatctctaaatctctataaaactcatcccaactttcactttctaatacgttttctttctgaggatgaatgtaattaagtaagtttctaaatattgtattcttcttgccattttgtttatcagatgtttgattgatatctgtgatattatattcccaaacacgcataccagagttatatgttgggatgatactagctgaaatatgtgcaatagcatatctttctgaatgctcaccacctttcttcttcccctttaatttagcatacatcgtgtctctaatactttctaaatatgaaactttaccatttggtgctcccatatatctatcagagaaaacatgtaatggagaatctgattcatcatctaaattaaaacccagtgaggtatataaatcctcaactgtatcaaaatcattatcgaaatcatcatcatcattgtcaaaatcatgatcaagatcattcaagtgagctagttgttcatagttaatataaggaattgattgattttcgtccaaagcgccaagagatagaagtcttttttctatactcctccaagctttcacagaatctaatggaacccaatgatctatattcatatgaccccaaagaccaccaataattaaatctctatattcatgaatccaaacactaattttagcataacaactatgatgaatattcttaggaattggtggaacatgtccactgagccaaacttttaatcctctacgacgacattcttttaaagttgcacctagccataaaaataatttataacctggttgttttctggaatcacaagttatcattcaaaggatttgattgaaaccaatataatgtattgatattaatcacaactaattttccaggaataacttctctagtgaaatatgcacctctatcaaatgtatgcatttgttcatttggtataaagtttctccatattctgtataattctctagtttgtaaagttggaccaggagcaaataaattgtgagggaaaacatcattattacctaaacttggaatgatcttaattcttcttgaaaatggatcaacatcttcttcaccctcatccataaaagtatcagaaatgttatttgaaacatattcattcattttaaaaatttcagcttcagttcttggattacttctatcattagtcagtgtctaatattatcaccagtccaaacaacaaaatcaatatgatctttcaaattttctctaatccaagctaaacttaaactatacagatccattggtgtatcgcaaccacttaatgcatcaccatatttgtgagatatatcattttcggatgtaatggatttaacttttttatgacattttttacgaattgctgcacctatcacatttaagttcatcagggatgcatatcagtaatatgtaaaaatctaccatgtaaaacattctcttgtatccttaccacttgatgaatcaatagagagatattgtactgaatggtttggagttaaattgagttttttcaaatgttcggtaacttccaaactatcaactaattgtttagaattttgagtaggtctctagcaccacatcatcgttgaaataatcattaaaatttatacttgtctgtatgaatataaaccaagttgaaacagctaaaaataaagtactaaatatgactttttttgataagaaagataattttttactataatggtctgacagtttcttcttatcttgaatggaatctacatctgagttcattacacttttatctggattattcctctccaaaaggctaggttcataagccatattgatagtgaaatattgttcgagacaaaacaaatgaattgacagaaaaaagttcaatctccagtcaattaaaataataaaaaatattaactaagttaattgacagcttcatcttgagatatacacacgtttatcaatagaaaccagcaaatgcctttcctctattgcgtaatcactgcaaaattttactattggtgggggactaatattcggaataagttttatgggggcagcggccgggcctagtatgggatcacgtgatggtatctatgagacacccaccagagaatggcaggaataatcacttgacttcagataatttaactagagttataataatacatgttaggttagggtatatagaatatatagtagtaatagtatatagcattacactgggggattcaatcaatcagttaatgaatcctcacttttaaagtaatcgtaattaattaatgcttgcatgtatccccattcagtaagtttattcttcaaccattttaattgaacaggttttgttaaataatcattacatcctgctgctaatgcatcttgttgatcagacgcacctgtagatgcagtcaatgcaacaataataataggtgatctaaataatgtaagatctaaaatatcatcattatttataacatgagaatgattagaatgtgatccgtgattatgattatgataactattattttcatctgaattaccacctatatcattcaatctttccagacgtctaatttcctttgtaacttcaataccactcatgaaaggtaattgaatatccataaaacaaagatgaaatcctcctaacttccaaatttctaatgcttccttaccagtagatgctatcttaaattgaacattacatgacttttaaatgacgagccataatcttttgattaaccaaattatcttcaacaactaaaacattaatatgagttagaatttttggcatatcatatttctttttatcctttggtttatccgctttttgtgatttggcactaaaacttttaatgttgtaagatgtacttggtgtatttaattgtatagggacattattaggagtaattttaggaatattcatcgagtttgtattaggtgtagaagtcgatgcgctaaagttattatcatttggtaatttttcaggttcagctggtttatcaattgataccggctctgtgtttaaccttaaattacccttcttaaagagtcaactgaacgagtagattgttttctactgacaggtaatggcacgatgctactatcttcaatttttggagatggtggaggcggtgggacattatcaacttgatatactggtgatttagaagaatctcgtacatccttggaaaataatataacagcagatgattgtggagctgaaatcggtgagtctgaatttaatgattttagtctaggtggaggtaccttttgatcacctagaattgctactttactcaaagacacactattattatgtggtgtattactgaaagaatttgaacgacccatatcaattgaggacagttcagccctatcaactgaaggaccttttatatgactgggtgcatggttaaaattattttttattcttctatttcttttcaacaaatcttcattaggtttatccggttgatcaataatcaaagcgtctgacatagacataccatcgggaaaatatttatctaatattgaccatacgagaatatcaggctctaatactaatgttttagaagtcatctccgatgaaaaagtattattattactgttattattagcacccagatcgccggtgaatgaactaggtacagtattggtattattagcattagcattattgttaatagtattagtattattggtgttattgtttataatagtgttaatactactattttgttctaaaagcaaacctgatctcacatgcagcattggttcaggtgatataggggtatttgaccgtaagctttgtgagtgtgataacatattattggataatttcgaaccaccggatgatagtggagaataagaatcttcgaaaggttttttcggaactggaaaccatgaaagtgcagattcatttactgttgaattagcattgttggaggtagtatcctgattcaaaaccatctttattactagatctgatggatcatattctaatgctaatgttgttggaaatttttgtgaaatcatgtattttaggtcatctacaatatcatatggaccaatcattattgttgttgccgtatggttattcttttttacccatattcttctcaattgtggtttctgttgaggagcatacatgcctcgactaaagctagactgtttaggactaatcgtttccattgtctgtgatattgatggtagcatgaaagagcagtgatagtggaatggaatacagcaatattgataatgcttaaagtgtcttaacagtgtcagctgaaaaccatttctggcaactattgcgatgaaattttaacatgaatttttcctttaattttctccatgacaatgtttctgtcgtaggttttttcacttttaactcttcattagtgtaagtgtcttttgagtaaatagagaataatgaaggttatacgtcatattgtaccgcaaatacgacccattgtaaaaaaagttgatgatgttaatgcatgggatgctataggtaacttttggaaagcgatgaagaaatccaacataagttatgaaaatcctcaaaataatcaagacgatagtatagagataatacaatttgaaaaaggcagttccaccaacgattccctccatttacccctattggaagatttgaatttgatgaaaaaatttacgaaagccacaccagaagaagtagaaaatgcaccatttgaattccctgaatctcgttccaatatcgtaggaagaaacactccaatctgtcgagactttacccaactaaaaggtgcaaacaatgatcttttctgcatggcaataagtcgtgggcttactagaaagccagctatgtttaaaagtaaatggtttgtctttcattactaccattcggattcattttctgggtaatattgtcaaatctcgtccgggggtccttgtttcatgtcataatacaaatatatttaatacacacctacaaatcaagggagaaattcctaaaagtattagaaaatctgcatttcctttcaaatcatcagtttatagaacaaatttgaagaaatttttgagaaagagctttttagatttatatctaaaagatgagagttttgctaacaaatacaacggtttatatgagttctcaatcaacttgtaccctaaagatgaagaagaaaaaaaagaattcattgaacacctagctctctgtttgaaagacgtagccaagaaaacaaaaccaatgagtgaaagagatattcaatgggagttaagcagacttccgtggtatgacgtacaaagagttttgaaaagaaataacgtacaagacttcgaatttaaagattataaacctcataatagaccaaaaagacccaggaaaaccaaatagaactcgtaccaaatggcattaacatgcatgaaattgtagatcatgtcatatagaacattcatagaaaatcaagaaataagacatatttccctcttgttaaatagaacaccaatctggtaatttagtttcaaattcccaaccatccacatggtttagcttatatttgtatgcatgtaaatacattaccatatcctcaggcttttgttgtttatatagtttagcatcacatgtttgacaaatttcattgctttcagcttctaccctattatcttccgcttgtttgctaataatatcaaagtaatcttcactgatttccttataatctgcaccatcttttaattccattaatttcccattaccatataatggatcgttcattatagggtgttgaagatttcttaaatgtattctgatttgatgagtacgacctgttttaggaaaacatctaataatactttgatccaactccttattgtatgataccaattcaaatatagtctctgcgggttttctagttataccgtcaactttaccctttttagtatccaaaattattatatcatgatcacatcttgtttttccttcaggaaacttacctttaactcttgcaagatatactttctcaacatctctattctggatatccatttgaattttacgagccgtttccgtatttttggccaatatgcatacaccacttgtcagtttatctaatctataacatggtcttagtattagttcaccaattcttggtttttcattcggccatccttcattttcaagaattttgaccagtgagttgtagtaatagttttggacgggatgaattggtattccgctaggtttattaactaccaaaatgttatcatcttcaaacactacttctaagttatccttctcaactccaaaaattgatctttcatggatgtgctcaattctttggatcacatcattaccaatcaatttgtgatccataatttccggatattttataatctttttattttcctttgctgaaccttctttcattgaacgtttttcttttttagatagttttatcggatgtataacaataatttcttcattttctaaacgttttttatattcagcgggtgtgaatgatctgaactcactactgaaaatatctaaaactgttctttttgaccatcttgccttcactgtcgtcgttattgtttggaaatatgggtccaccgttcggattctgcctgaaattatgtaatttggttgtattttatccatttcttttttgggatttctcttattccagttattcaatagattatttttcagatactgttttgttcctttaatgataaagcccataggcttaactttaatttcaacttgtcttgtacttagagcaaaaaagtattacaaaactatatcttcccgatcaaggaaggttccaaaatgcttaaaagatttggaaaaaaaacattttgaaaaaagtgccattttttgggataaattctaatcttttcaaatatttactatcggttatcggctgtacagttttgtacaattaacacccttgttttatgactatttttacgtataaaattacgtataaaatacattaaataaagtattgattggtctaaaatagtctacatataatttataaattgagcttattgacgttgttgactcaaatgtctagttataatacgtccattatctaaaaatgcttgaacaagatccatgtagtacaaaggatcatcctcaacattatccatacttcgaagtaatgctggtgtattaatttcaagttcaagctcatatttgggcactctattatttttctctttaacttttgttaaatcgactttggtaaatgttgcttgatgaatatagctaattctttctttttctctttccatagtgactctctttttgaatatttcaaatgctgcatcatttaattcatttggaagttccacagataaagataaacgtaaatcaaatagtgtattcggaaaatgaagatataaatctgatattctttgctttgtaatattattggtttttctcttagttttcacatcaatactaacacgtcctgaaattggtttatcatttctacgtgaatcactggcaattaaatcaagaacgtgtgaactttcagtaatatacttattatttgcatgacctctaccttgttgttgctgttctgctgcttctttaatcaatttgttcataaaagttttagtatcattaaaattttgtaatgttatacctggcttgaaaaaacattcctgatttacatagtctgttgcaacaacacattcagtattaactggtaattgaatacgtgcatctctcactttatcccagatattacccaatttcaattcaatttcaatatattcttgaacattaggaacatctaaataatcttgtttaacaccttcaacatttgcccaaatccattccgtaacaagtttgttgaaatcatttcttggaattgagccagtaattgatggaatatcaagtttcgaaataccacctaatgaaccatcagcatttgttgtttgtttaataattctaccagatgaaattacacgattgattgttggaatatagtcttgagcccaagttggtttagttttatatcttcttggtttcccatctgatggtgcagaatcaacctccggttgttttttaatttcttcaagtttttggatttttttatgaatactttcatgcttattagttattaccttttgttattaaagattcaggaattggtggcgtagtcagttgtaggtatttctacatccttttcatttgtaagtgcacttatactgtttctcttttttatacgtgacgcattttcttctgataatgattcagaagcatttaatgtttgcataggtgaaatgatattttcattattaggttgttcttctttataacctaattcattagagtttgtgaatggggcagttctttgttcagttgtaggattagatgcttctatctctttttcttctggttttgggatgggaggtgcaggtttcggaagtattattcattaaattatgaatcgaaagtctgggttcagaagctcttttggtcaagatctggttgaggttgtgcgttttcatttaattcgtctgacgcttgcctttcatcatcactggttcttgaaatcaagtttttcaagtccatattactattttaatgtgatggtgctgccaatggtgaaactttgtttatatcaacctaactctgaatagtactgcaaatttattctgaaaattgctggatattgtcacttataagtgattgatgtaatttttcaggccgcgctacagctgttcatgttggagctacactactactattagaatagctatattacagtgtaattaataccatgattatagtattgatttattttgattttgttatattacaaagtgtataaagctaatgattctataagaaaagtgtttagttcaccttactttcttgtttcaaatttttaattgatattgatttacttcttttaggttttccgtataaaatattgtgggagtggggtataatatcatttttgcaggaatctataatatcttgaatatcagctatcataaattttgtttcatttcggacataatccttttcattgaaaagtggtaaatgtttttcaccatttggacaaataaatagttctggacttcttgatgcgtgtcttcccatacataatgagctgttatttgaatctaaattttcactatgtacattgagatccgtggaatttgttggaattgatatgctgctacttttgtcaactttattaatttcatcatcgatttgtaaattatcaatctcttttatccacattttcatattttgattcctttaatggattaagttgtgctgaattttctgttgtggtgatttttggcttttgaggggaaactagagactcatatttatgtgttttgatatctacagtgggtaaatcatcccacatactatgtttaatatcattttgaagtgttatttcttcatttgaatcaatttcaaccttgaatttcatttcctttgatttctcatgacgacaaaaattgctttcataatccctttcattaacacaagtttctagtttttggaaaaaatgatttttaaataagtaaggtaatgacattcttgtttgtggattaggatcacatagcctccaaaataaataaataaaatttgggtcatttccatgtgcattactgaaaacacttgatttgggtatttttaatagttatattatctttgaaagttggattcaattccagaaatttattatattcaattgtgtaaagtttaaaagctggatctgtcggttttgaattataaatggaagcttacccattattagcacatagagaagaatacctaaagaccaataatcaaatttgaaaggacaaaatggtttccttgattgttcatccataatattatatgcggcaacttctggtgcttggtatggtggtgttcccaatcttttcgttttcatagctattggacttgaaaaatcaccttgacttgtatgcccaaattctgagcatccgtaatctgttaattttcatcaatccattagagctaaccaaaatattatctgcctttatatctaaatgaacaatatcattttcatgaagatatttcaatccaaatgaaatttgtttaaatatacacattttttcagtaaaaggtattgatttccatttattatcccttatcaatttatatagatcatattcataaaattccattaccattccccaagcattttgtaatgtgaaaggtaattgtagtaaatcataacatttaacactatgtaaattaaccatatttctcgtaattaaatattcaactaacactctattataatattttgattgtgtttcagttttgaataatgaaaatttctttagtgcaaatagttgatctttatattgtaaatccttcttattatataaaagtttgatggttgatgagcctcccaaaccaatgtttctatcaactaattggtatttatcctccaaatacacttcagtttctctataaagttcaggtaaaaagtcatttgggtttgccaatgggcttactaatcttaaatctggttcatcttttttaattccatcaccaaaggctgatcctaagtttgatatatcgtgatgattataaattccatatggattatattcaagtttattatgaccatataaatttgaactggaaaatgacttactacgatgattcaatgaaccattagttgataaattcaagccctgaattccttttagagtgtgatctatgttccgaatctgtactactattatgattcattttagtttcttccacatcagaagattgatcaatatcaaatgatacacggtgttctaatttgttatcagatggtttacttgtagtatactctccagcattttgaccggaacgtttctcctctttcggtatctgactcttatccttgaatatcttagttgggatagaaacaatttttttaaaaacacctttatgttccttagacatggtagtatcttttggagtgaaatctgattttggattctttatagttttactttcctttatcattaattctaatcgctgtttttaaagatatggtatgaaaaacaagataagaatagaatgaaaattcaatgaacaaaagaaatgaagaaaaaaatatttattacaattgatgtattgtatgaagttacatttcctgaagatattcaaagtgtttacgagtgatgctattaagtttcttggtaatcaaaccataaacacatgtgggcaccagaaaagttacccgagtagttctccaaattctcatgatgtggaatggctgtgcgctctaagtttttccgctatggctcgattttttctatttataatgaagtattggagttattttctctcaattagagtattcttattacatttttgatgtcttttattggtatttgtgtaggtgtatggtggtagtgggtactcactctatacatactagtgtataaataaaattaaattaattaaaaaaattaaaaaagagtaatttttgctaaatattttgaaaatttggtaattttttttgaagttttgaatcacccccttaaaagtaaaaatttacctatttcaacctggttaaaggaaatataatgctaagatgaagctttggtaaaagtatcaatcactcacaaggtctatgtaatgaaaaaaagagcattaaagtttgcgcaagtcacgtgaaaaatcagcgtggagtctgcaaaaacagctttttcgcacctagctggtacattagctcagaggtttagagcatcgtgcttatagtcgtattacaacgattatgcttatcgcataactccgttttccaagaaacgcgatggtcgcgggttcaaaccccgcatgtaccactttttttacatttcatttcacatcattaggatctacatgaatttaaatcaaacgttgaatgattgaaattgtttcaactaattgatttattcattcttggaagtgactgtttgatttattttttatatatttcttttgtcagattttctcaattcttgatatggtatttgtgtggctaatagtatgcactaatttattgcatttggctttggcattgactaaggatcaaatatttcaacatgattggcaaacatatcatattggaattccgttcaaatctatagagttaaatgatactcttataacattatcttcaaacgggatattgtcaactataaatacaacagatggtgaatgttttatatagatatcaatctgatataaatcctatatcattggattctggattaattccaattgattcaaattcattcgtttcatactttaattatgaaaatttaaatcaatcacagttgatagtttggaaatcatcttctccatacggattcaattgaaaatgaatttatctttgattctaaaatattatcagttcaaccagcattggataaacttatcgtttttaacaatatgtctatttcagtgataaattataggaaacgtaaaaactcgattgaaagaatatttgaaagttcatcattaataaaaaagactaaaactttctttgatttggaattaaaagaagttttcatatttatagaaaccgatgaaggtattcatttctctaaatcatcaaattttgatcttaaaccgataaaacaattagagatttatgatatttcaacaatgagatacaaccgtggatacattattttaataatgatcaagtatttgagataggggatgaaatcgtcaaagttgacacaaaatcaaactttaatttaataacgaacaaactctctgcaaattctttgatcagtactattgtagataaatttgaagtgattaatgaccatgtgattatagagtccaacaatcatattaacttatttaatcatcaaaatgtttcatttgtacctaatgttgtttttgaaatcccaagagaatttttagactccgtttatctctcttactttatttcatctgatgattctcatgtcaatattttatcagtttcatcatctgatgttgtttcatactatgtcaatggtttattaaaatggtcatcagatcaatcatttactgatatagttgatcttgtcattctggaaaatgagcatactgaatcaagtatatctagttggagattccttcttacctgaaaaaatcgaacttagtccaatgaaattgatcacaagcatgattaaaaatttatacaagactgttataaatgatttgaaaactcacatcaataatgataatgatcaattatttggaatgtgcaaaaaattagtggttttatcaaagaataataaaattggtgtctacaatatgaataaacatgaaagctataaaaatcaactagttgagatattttcacttccttcaaacattaaaatagagaagttgcatttggtaaatgatgaagtcttaggagtctcagatgacgggttgttcaaaattgatatagcagaaggtacttgttctgaggtaactgagaaggacaatattaccaccattgctttaggttcaaaattgatagttttggactctttgcctgaagtactgtatacttctaatcatgatatagaattaaatgaagtaagaggatataaaatagttaatggtgacttttttgaaactttccattattctccagaaaatgaacaaatactttcactaacaaaacgctcatatggaaatgataaggttgcacaaaatggtatagttttatcagatagatctgtcttatacaaatatcttactccaaatatcggagttataacgtcgtatgctcaaagctcaaacttgattgttattagaattatcaatcttgtgacaggaaaaatatatggatcattaaagaaagaagttaaacctgaaatagacataaatagagatattaatgtcgcatttgaagaacactttataatattcacaatccctgatagtaagaattcattaaacacagagatttgctcaattgatttatttgaaagtttgaaaccaaatcaaaaatttacaaaagacgttactgaatactcatcttttggtaattcagttttaccatcgtttgcttcacaatgttttattattccattttataaagtgaatgatttatcaattagtaaaacagttaataatattgcaattaaagatattattttacgtacatcaaatggccaaataatgtccgttccaaagatgatgatagatggtacaagaaatggtgttattggtaactttaatagaaatggaatttatggtttagatttgagtttggataatactaaaattacatcaaatgctccaagtatttattcaagtgttcattcatcatctatagtgaacaaattcacatataatcctatcatacacttcagcagtcaatctatattgtcacatataagaaggttgacacaaaattcactaaaagattctaaactatttactgttcctacaaacctagaatctacaacatacgtcgtttcaatcgatggtgatatttttgtaagtatattacgaccttcaggatcatttgataagttgacaccagactttgctacggggacattgattatgaccatagttttccttactgcaggaataatatttataaagccgaagttacaaagacaaaatgttttacgtctttggaatttatagttctaatgtttaattataatgtgtcaatgctaaattgtaaattgataaagagaaaaaaatctatatataaaatgcaagtgtcgatttgagtttaattaaatggttaatgcagcatatgtactaataactccaaaaatcaatgcgataatcatcactaaataatagaaccatctattctttggcttgcataacttcaggtaaaatgcacatggtaaaacaatgcaaataagtgtacataatgatgatccacttaaaccaataattttatcaaactcagggtataagatacccaacaaaacaaacattaaattgacaccaattttaatagaagcagaggacaactttgtcatgaatgtaggacctttacctgtcatttcaatttgttgtggagtaataccgaaaacaaattctgtaatatttatgattggtaatgcattgattggagttttagcaactggtatcaatgaaacaaaaatactagcaaaaaagtaaacaaatttaggataacctgaagtcaacaaaacagattgtgtaatttcatttaagatacctgcaccgaacatgaagaaacctaaataagccatcgcagcatctgcaaaaaatccaacggaataagtggttttaagacatttattgaattcttgaggtttaaccaaatctgcctttaatgtgggaaataatgaatgtgaaccaaatgggcccaaaataataccatatgaaacaaaaaggttcatgagtgatggtggagaaatttcaaatggtgcatgttcaattaatgaaccaggtgcagtttgtttaactaaaccacaaaagaaaatcaaaaataccaatgagattgttgagataataccaattaatgaaatatgagataaaatatttaatggaagaaaagaaaatggagttaatacaatgaatgcaatcaatttaaactgaactaaggaaattgatgggaataatgcatttaaagaatcagcaaataaaaccattagtgaaacaccgacacctaaaagttcaacagtaaataacaatgaaacaaacaatcttgccttagggccaaatgctttaaaaccaatatcagcataggtacaaagagttggatcggtatccatacattgtgacaaaagagtagcagtccagtaagtaatagcaacagagtaaatcaacaggagtgtaccccaaaacagacctgcatgaaccaaggctcttgataacgcaagtaaaccaattccgataagtgcattaatacagttgaaaattgtttgtgcaacagttgattgaggagcaatcatagttaatttaacaccattttcagtctcaacttgacgaacaacgatagagtcggcatcattggtaaaaactctagataattgatttccatgtaggggaaatacagaagatgcaaatgatggttgtcttgagacaacataatcagtaaatgaatgatctgccaaggaatgatcatcatcatcagctgcttcatcaaaaacgttattattaggagaagcagattcaataaaatttggtcttacaccaaagacagtagatattttcctacccattgtagaaggagcaaatgtattcggatcaataagttcttcatcatctttaaagaaggatcttgatgcttttattcttggttcaattgatatagaacgaaatgattgtgctctttgataagagtttgcaaaggcagaaaaggagttccctacacctggagatagaaaaggatttgaaggtttgccatttaaatgtctattatctggatgaattgggattgcttgataaggagttgatgcaacatgttgtctgttaatattcatactagcattagcagcagctgcatttaatggagtgtaagcagttggtgtgccttctgaattcttgtgatccatctccctgacaattgatccaatgggttatgtagagatatcaatatcaatctgtaaccattaaaatatgcatgtataatatcaaacaatcttttaagaagcaacccagattgtgaaacgtaaataaagagcatccccaaaaaatgaaatttccgccgcaaatttcgcagcttttttttgatttccgtgattttaattttccgttctgtttccatgaaattaatgttatgttgatctactctttaagatgtgtatatccatcagtttagttgtttatcttcttttgatataccaataactgcaagataaaggatgaagaacaccttctttatttttactttattgcccctggttgcacaattagtttctggagcttatatagctacggaaattgctcctaaaacaacttttacaaatactgtgaatactatttctgaaccaactggtttagtaaaaagagatgctaaaaaggctattgttaataaagaatggcttaaggatcaatctgaaaaaatgtatggtacagctgaggaaccagttaagccatggattagaacaattcatgaaaccgtcgttgaagttgttacaccatatgttgttggtggtgttacatttgcagctgaaagacctgcaactacaaatggtttagaaccttggatttctatagatggtaatggtttaccgaaaactataacaccaaaattagatcatgcaactattgctaaggcataccctgatgttggtacctatttcaaaactgcaactactgttgttcatcatcaaaaagatatcaatgcacataatatgaaagaagacgaaacaatcgaactggttgaattaattgatgaggatgatacatatatccaattaattccattacaaagatgtacacctgattattatttcaaaaaaggtattacaaacatggaaagttctgaacctttttgtgctccaaaggatcatagaaaaatgagagttggtttaacttattttgtaacctggtttacacgttatttccaagatgttgaaaaagttaaatttcactatgcatatgttaacgaaaaacatcacgataaaggtttcgataagagagatttatatgatgaatccttaaaagatatggatgctcaaattgaacaattatcaggtaatcttgaatttaagggtgatgttgaaggtgcattctactcatctaattggattaagaatgaaggttggtatgacattgaaattgataagaagtggttaaagggcaaagtttataaaaaagttgtcattgcaatccaacctgaaaatgtccctgatgaagaattctcaatcttggatgctgcacatttctttgcaactttccaattaatggaaagtattggtaaaaatactaaggaaatgcgtaaactacaggatacaactggtactaatgatgacgtttactatattattgcaggtatgccaacaatggttttgattgcggttgctttaatgtatggatttttataccttaacaaaaaacatagagatttgtctcatatcaaaaagccaaagaggagtagatttggtaatgaaggtaaatataatattccaattgcattgactgatatcaagaaaccaggaaaacaatcataagcataactgtaaatatataaccctatcaaataactaataactctttctaataattaatcgctgcagattgtatttacaatgtatcaatgcattgaatgaaaatttagtgagttaatcaataattcattgaatctttctattctattttattggattttcaataaaatttaataatgctaaattgagttaacgtttttgaaaagactggattgtttaagctttattcagccatctactacgatcttggtcagatacgattcgtacaacttcagtaatcatgcataggtatcggtaaaccttcctaaaacagcctcaaaaggaatattttttttgtatgacaaaaaactttgttacatcaacaacagtgttactacacaattaagtttatatattattgatgtcactttttttttcttcatcaaaaatcagtaaccaagtaaacaataccctataatggatgctgcaacattattagatcattatatacatgatcttgctaatatacccgaagaaaccaaatatctgttatcagaaataggacgaaaagatgttgaatatgataaaattatgagtaaaatacaagctgcagactctcagatatccaaatatataaagcaacatggaagtttagtacgacatcctaaagaagattcactgaatgacgaaatgatcaaatattatgaggaggctagaaaaatatcgaatgaaaagatattactctctaatacagcgttattgaatatttccaaatatgtttctagatttgaaagagatattgaaagactggtagagagtggaggaatagatcattgggactatgttgaggaagaagatatagatatgattgatgcaattccatcaacaggtaataaaaactcatcattcaagaatttagataaaccatatgctagatcttataacggatcaagtaacagcaataatactttcaacgatccaaagaaaataatgttatcatccaatggatcagttagtgaattaaccaaaaagatgatcaattcgtcacttgaatcaaaatctcaaaaattaccaaagaaatcatcaagggataagactccaataaatgataatgcatcaactagagaatccactccaagtatgagaaagaaagatatgagtatgagtactccaatgaataagggacctagtcgtaggattccatccggaagtggaatgggaaataatgaaaatggtaatggtgaagatgatgaactatattgtttctgtcaacaagtatcatatggagagatggtggcatgtgataatcctaattgtaaatatgaatggttccattatgattgtgttggtttgaaggaacctccttcgggtgtttggttttgtcctgattgcaggaaagatggtaagaaagattttcctaaacgtgaaaagaaaaagaaataaaaccctcaagttacttcttctgtataacttgtataactgtatattaaattagtttgtataccaaacttttgaacttattactataatatatatgtcttctattaagcttctagttgaatataatgtttccaagtatactttaagataatctgaaaagtcattacgtaatattttttttcacctgaaattttcatgtaaatttgtaaaaaaagttttttctatcaaaagtttttaaagacagaattagcttgaaattgtttaggaaaatatcataaataacgaaatcaattcaggcaatgagtggaatcactttagaaggaatattagatgatccaacaattttgtttggatataacaaaactgaaggaacaggaaagacagatgaatttttaaattgtgatgctttattagcaagtcttaaaagtatagttgatccagttatcaaagaaagtgaagaatccgttttagatgaaatttatgttgatggattagatgcatcacaagtttggggacaagtaaaacttgtttttgatggagtggaaaagagtatatggtctgatattagtgaatttaaatctaatggattttataacgaagaaagagacgaacaagaagaagatgaagaagaagttgaaagcgaagaagcatttggagaaatggaaggtaagtgatagtgaagaagttgaaatgcaagaaggtgaagaagaagaagtaaattcaggaaaagaagaagacagtgaaatcgatgaaaatgaaatcgaagaagaaatagaagaggaagaaaatgacgaagatatggaagatgaaggagaagaagaatcagagaatgaacaagaaggtgatgatcactttggattggatgatgaagttttcaaccttgatgaatataaacgtcaagttcttgcacttgaagataatgatttctcagatcaagatgacgaagatgttgatttttttggagacctaagtgaagatgacgatgatgaaatgtatacatatgacgacttttttgataaagttgacaataagaaaggacatggaaagggaggaaaagataacttcaagggtaaaggcaaagctaaaggaaagaagaaagatgaagaatccgagttcttagaagaagattatgatgctgcatatgatgcagctcaagctgatttgtacggtgaagaatcagaagaagaggaagaagaagagggaaataataaaaacaatggaaaagaagaaaacttatctacatttgaaaagcaacaacgtgaattacaaaagcaaattgccgaattagaagcagaatctattgcagaaaagaaatggacaatgaaaggtgaagttagtggtaaacaaagaaactctgatactttattagaagaagaacttgaatttgatcgtactgccaaaccagttcctgtcattacccaagaaactactgaaagtatagaggagataattaagagaagaattgttaaccaagaattcgatgaagttaccaaaagaataatctcagagttgaataacttcaagaaaagtaagaaagttgatgttagtgaagaaaaatcaggtaagtcacttgcagaactttatgaagatgaatattcagataaagccaatggtaaggaagaagttaatgaagtgttagaacaggcacatgcagaaatcacggagcttttcaaggatgttacttatcaacttgattcactctattcatcacattttgttccaagaccgaaggaaaaattaatggatgttcgtattgaaacttcaactatttcaatggaagatgcacaaccattaacaatgtcaggaagtaattcattagccccacaagaaatttataaagctggcactaaaataaggtaaagatgaagttttattaaaatctggtgttgttatggctaaggcggaattagaaagagatgataaacaaagacttcatcgtgctaagaaacgtaaacaacatatgcaaagtagaacggaatccattaaaaagaataaggtggaaactaaacaacagtgagtccataggatgtgcatttccatagcttatataaatatttacaattagctaatacatgaattcatgttcttgtacgtttccaatcatccatcccatgtaatataattacctgaacataatgtatagtataattttagttgaaaagaagtaaataataaaatttcaaaccccctatatattagaggctcaacaagttacagcggaagcttcttaaagaatcaatagaaagaggccggttccgtacgtaaccgactcttcccgggggcgggcaggccctagcacactttcacgtgacatgactccaataatattatttttattaataattattattttcatttattactttagttttttgttacttttcataacatgaattatacttttcatataattatacttttcattaaacataaattatactttcataaaagagcccgttaacgggtttgcgggtgtatgaaaaaacccagctttcccatcggacaacaaccaaccggagggacaaacaaagtagcactagctgacaaagccgggccaacacaagcccgggatatgtcagaccccggggggtttgcaaaaatttccttcccttccaattgtggggtcggaacactgtcagccatttcataatttgtgggggatttattagcttctattagtaatctgtgtacggcttgtaggggtgtagccaccccctcggagacagggattgttccttccactgggggtatgacttaaggttccggttatctggaaaacaaccccagtagaatttgaattgttcgaggggaattttcataatttctcaccccttgctgaacttttacttcaagcggtttatcaataatttttcattttgacagtaatttcactgataattgatgaataatttatgataatatagtctttagtctatgaattgacattttaggttttcaactatttaaagccctgccaatccactttataatatctacgtgtatatatatatatatatgattaatagatttctatcctcttctacttcttttttaactaagagaaacttacttaactcaaagatgtctttcgcaactgttactttcccaattatcaatgaaacttatgaacaaccaactggtttattcatcaacaatgaagttcgttaaagcaaaatctggcaaaactttcaaagttacttcaccagctgatgaatctttaattgctgaacttcagcaagcagaagctgaagatgttgaaattgctgttgaagctgcttcaaaagcctacaaatcttggagatttgtcccaccaaatgaaaaaggtaaattattaaacaaattagctaatttaatggatgaaaaaagagatttacttgctaaaattgaatctttagataacggtaaagctttacattgtgctaaatttgatgttaatgttgttattgaatatatcagatactgtgcaggttactgtgataaaattgatggtagaactattacaactgatactgaacatttcactttcactaagagagaaccatctaggtgtttgtggtgcgaattactccatggaatttcccattattaatgtttgcttggaaaattggaccagctttagcaactggtaacactattgtcttaaagccagcatctgcaactccattatctaacttatttgtttgttcattaattaaggaagcaggtattccagcaggtgttgttaatgttatcccaggttcaggtagaggttgtggtaatgccatcttacaacatccaaagattaagaaggttgcttttaccggttctaccggtgttggtaagaccgttatgaaggagtgtgctgaatcaatcaagaaggttaccttagaattaggtggtaaatctccaaacatggtcttcaaggattgtaatgttgaacaaactattaagaatttaattactggtattttctttaatggtggtgaggtttgttgtgcaggttcaagaatctatattgaagcaactgatgaagaatggtacaacaatttcttagctcaattcaagaaagccgttgaagacttaaaggttggtaacccattcgaagaaggtgtcttccaaggtgctcaatctactccagatcaatttgaaaccgttttagaatatattcaagcaggtaaagaatctaaccttaaattattaactggtggtgaaagaattggtgataaaggttacttcgttcaaccaactatattctatgatgttccacaaaactccaaattaactcaagaagaaatttttggtcctgttgctgttgtattaccgttcaaatctacagaagaattaattgaaaaggctaacgattcattatttggtttagctgcaggtattcacactgaagatttcaacaaggcaatctatgtttccgaaagagttgaagcaggttctgtttggattaacacttataacgatttccacccatctgctccattcggtggttacaaagaatcaggtattggtagagaaatgggtcttgaagcttttgataactacactcaaaccaaattagttagagctagaattaacaaaccaatcctttaaattaattcttactgtgactaaatactatgatagataaattatttatcatcataatatctagagttgaatttatttactagaaactaatatatccaaggggttacggatttttaacttttttatacttttgtctaaatatattttataatgattaactttaaaatgcattccatcttaaatgaatttgattaattataagcgtcgatatagttatcgtgcaaaaaaattagttagtacccacaccacgaactcaaaaaacttcggagaaaaatcaattttcatctccgagtttttgctgtaaattccctttttaaattactaaccattgcagtgattttaaaagatccccgtttgattattgataatgaaaatattacaaacatacttttaatagatattatacacctgtgctgctttaaagaaaacaatgcgtgttggagagttagcatcagcagctaccttagcggtagcaccatttatcgatcatttaatttcaacaacaagtgcagatcaatctaatcttttgaaacatttaggtggtatgggtccatatgttaagggtactgggtttggtattccatgtggttttgaatggaatacaaaaccagataaagtttttatattttctagacatggtgaaagatatccgactaaacctgttgctcgtagattaaaagcagtatatgataagttaaaaggtgcagatgttatggatccagaaggtccattatgctttgttaaagattgggattttttcattccaggtcctgattggttaggtatggaaacactttatggtgattttaatgggtttcaaacaatgtatgattttggtaaaaatactaaaattaaatatggttatttgtacgaaggttgtgatgacattattccagttttcacagctggaaaacaaagatgtgtagattctgcagaagagtttagtaaaggttttttcaatgatgatgaagacaaagtccaatcaaatgttagaattattaaactagatgagactaaacgtatgggagctgatacattaacaacatcaattagttgtaaaaaatatgttagacacggtgaatatttcaaacatccatttattggtaaatatatggtatctgaggcaaaaagattaaatatgttaagtccaggtttcaatttgaatgctaaagatgtttatgcattatctatctattgtgcatttgaattgaacgccgttggcgagtcaagagtttgtgacgcattatccttaaatacatttattgagcttgaatattttagagattctgaattatggtatgaaaaagctgctcatccgttatcttttgctcttggatcagtctatgttgatgcaatgttaaaattatttgatgacaaggaaacaaagcaaaacttattttttagtttcactcatgatacggatttattacattttatgaatgcattaggattatttcaatatgaaaaagaagatttaagtactagagatattgattttgctagatttttcaaaacttctgaattagttccaatgggtgcaagaattgtaattgaaagatatacaattaagaatgaaaagtacataagagtacttgttaatgatgcagttattccaattcctgagtgtcaaaatggtccattctttacatgtaagttatctaaattgaaagatattgtttatgaaaagatgcaagaatgtaatttcgttgataaatgtagaataacagatgaacgtcctaaagaattaacattctattgggattgggaggaaagaatttagaaaaaaaaaagataattcaaaagaccatttaaacattatcaaaactttccaccacttgctaatatattactttaataattgcttgttgtatagttgtatttccattgtatcgtgaatgtataatatactgattcaattgatgcatatcaaaatcatattatcaaaactataaggtatatactgatccttccttatgcataataaatttaggttacgtaataaaactgtaatagctatagctcactctaagacgcgcgcagacaagtcacaattctaactttttttaaatccagacagagtgcataatatttgagagcatcaaaaaaatatagagtgtgcataaactaaaggagagacattgttttcgttttgggggaacaacaacgtcatattttatttgaatttgtacggtaaaacattacgtgtggtgtatatacaagtggaaagtgattttattctatttttaatcaaaaatatatcattcgttgattaataatatacacttcaatttaaaattagattcatttcaaataatttatagcatagagataaatatagaatagtacagttacaacattttttaaaaccatcaatagtcaattataatgggtgggaattcaaaagattgtaaaagctgccatttgcgtatagaagagggtcaatcatataagttaggaagtgatcactggcatgttgaatgtttcaaatgctcaaaatgttctaaaatactgggagttgattcaaattttctcgttttaggaactggtgcattagtttgttctgattgttcttatacttgtaaatcatgtgagaagaaaatttatgatctggcaattctaacaggagatttagcatattgtgctgattgtttcaaatgtaaagcatgtaaaaaaccaattgatgaccttaagtatgctaggacttcaaaaggtttattttgtataccatgtcataatatgctgattgaaaagaaaaagaaatatgaaaaaatgaaaaaactcaaagaaaaggctaaagaaaaatcatctttgtcacaagaacctataaactcttcaaatgaggatactagaaaggatgaaaataatcacaagcacaagcacaagcacaagcacaatcatattcacgatctcaatcacaaccaagttaatgaaacaagacctacaagtaaacgtgtagaatcagaatcttcaataggaacacaaaatcaaacaaaaagaattactggtgacgatgatacctttgaaatgaaaattggtttgaaatctaaaccttcttcgtcagtttctgagtcaagagtaagtcaactgatcggaatgaatcctcctaaaatgacttccaatgttgaaagttcaagtgttaattcgaaaagttcatttcaagccaacgtatcttcaacttctacatttgacctggatatgtacgctgatacatcaaaggatagtcaaaataagagtgaaataatgaacccacatgagaacggctcatcggtttacagtagcaataatgacaaaaatagtatacaattaagtgcagatgatttaatcactaataatagtttggagaaagttgactcaagtccaatcgaaaaattagatgttggtatggaataccaactaaaatctcctaaaactttgaaattggaacaaactccaacttttaatgactacaatgcaaatattgaacttgataataaaagtacaccaaaaaagttgaactccattccgattctgactcctcaagatgacagtgcaggatttgcttatcttcatgatgaaaataatggctcagatatgatgatccctatgagatctccaagaagagcagcattatcacctgtgagaaacactgcacaatttagaactcctgagctggatactcctagaaaaaaatcaatacctgaaaatttactttcaccagcaagtgatcatagaaaagcttatatcttagatgatgataaatacgaaaaagaaccagaaagtttcattaatttaaatgagaccgaggaggaaagtttaatgagtaaagaaacaaatgataatttgtttgatgacatcaagggagaaaatcttgctaataaggaaaatgaaaatattggattgatgagtccaattaaatacaaagttgaatcagccaatcctgttacacagaatgccggtctaaatattagtggattagatcctaaattaaattttgattcaacaccggcagaacacttgaataatacaccaataaataacgatatagacacaactcccaaagatccaaaggacattacacatacaccagaagatgcacaaaatgcaacatttgataattttgataaaaatgcaacacctaactccaaaagaaaacaaattggaggtcttggacgatcattaacgaaagttttcggtagggggagaaaaatgtcaaatgatttcactaataatgatcaacttgctactcctgaaacgattacatctagaaaatcttctataataacatcaacaaacacacctaaaaagcatatcagaactcaatctgaccattcatttatttcattcaacacacctcaaatgccacatactaaatctcataatagatcaatctcagaaagcactacatttgatattgtggaaaatgtggcatcaacagacagagaaacacgatctcttaaaactgaaatcaatgcattaactcattcaaaggctacattattgagagacattcaaagtttgaaagataagcttaaatctttagaaagggaagttaatgataaacagagagttattaaagatttagatttaacaataataaataaacaaaaaattatatcaaacgataacttatcaataagcaataattctactaattcagcaaagacatcactcaaagaagaatattatcaaattaacaacaatagtacaggtaatgtcaatataaaatacccatccactgaaagtattataccggaagaatatagtatacctagtcaaccatcaacacaaccaacatcattatctgcaacggcacctgctcaaccaatggctacatctgcatcttcaacaaactctttttaccaacaaccaggttcatcggcatctcaaacaaaggacaaacgtagtggttttatgaggagaatatttggatcacattcagcattgaatagtgcaggaagtgtacaaagtaacggatcaccagcaaatagcaaaccttcaagtgcaacgaatattagtcaacctatgaatatgagaagaaatgacgaatttgctgactccaacaatgaagtttttgagaatggtcaaccagatgttaatggatccaatgttaataaacttgatgttacgacaggtggaatgaaagcatctcgatctgcaaactttatgcaatggagaaataccaataataataacaatactaacaataattctaatggaaattcaaatgttaataactctttatataatatgtcattacaagaattatctacagtggaggcaggaaccggagttccatttattatgaaaaatatgtatgtttgaaattgagaaaagaggtatcaaatctgaaggtatttatagaattagtgcaagtacatcaaccgttgaaaaatttgaacagattttcgaaaatattaatgtcaataatgtgaatgaaattggaaaacttagagaaagtgttgaaaatattgatattaatgcaatggctggattattgaaaagatacttaaaaaagatacccgattctattataccgcaagatttctatgattcttttgttgggatttataaagttgatgatgaaaaagaaagattattacagttaaatgaaattatatcaagtttaccaagagcaaataaggttactctttatgccttgactaaacatttggctttaatatccgataatgagaaatggaataaaatgaatagttcatccttagcaacagtttttgcacctacattaattagacacaattctctacatcctcaacaagaaattcaagataataaagctaaaactgcaattactgaattactgtttaaaaactattcaagtatttttagtagataatcaacttaaaaaagttaacgcagtatttatatcgtatcattagtgttttatattttatgaattatatagatcgtaaagtaaattttcttaagaataagagtgtagatgggattgattgcatgcattaaagtggattattaatgaacattttttattgatggattcttgtacatttcataacgtctgtttcctaatcgtagtagatgttcgatagttgcaaaatcacgacgtgacaccttcctatacttattaaattcagaatgtatgtagttgaaccaattttgacgattttcctataaaatgtaaagcattcaatgtgttagtaatgtgtttgtggagaagattaaataatactatgaattttaaatacatactactggtttttcatatactgatcttaagcattttctgtataaagttaatgcttccttttgtaaacctgaaaatttctttgccatcttgagtattcacgattgaagtagttaagtaagttgtttaataacgaaagagttgtttaatgttgaaaagtttccggaagtgtgcaaaagctatatccgagaaaggaaaataaattttttgggaacaggatgaacattaaaaagtttagaatctaaatgtttaactacaatatggatgatgaacatctcagaaatatatatggggaacagtttaaagattaaacagacaagatgatttttattaagttattaatataaagagtaatttatataaaaacaagccgcttagtagaaggtagttggtctctttggagcatataacttgttggacttggtaactctgtgtggaagagggaattttaaatcctttcctaaaaattgtttaatgtattgtctcttgacatcagcagtcttttcaatttcaacaatctttaagatgtggattgatctaaatcttgctctgtgtcttgcagctaaatcagcgtacatagtttcaattgcaccgactcttgagacatctctgtattccttgtacatgttgtgagtaccagatcttgaatcgtatctaatccaaacaccaaagttcttaacagtagttggctttgattcagtaataacgtttaatgaaacaatttcaccagaagccttcttaactttgtgtaatttttgtaagaagtaccagtatctagattttgcaacaacatcatttggagcaaaaattctcatacggtataattttggttctgggacagattcagttggaagtcttctaccgatgacttgatattctcttaaacggttagccactataataaataaataaatagagataaaaaaatgttagtataatgtttctttgaagatgttgaatgattatgtttaatgagtttcatagaattcatagatgagtggcagtttagtcttctaaataattttcttctatattcaataattttcagaaattccaggttctgtcattggtcattagttgtaaaacacattttggtaaatagatataagttcttaaatgaaaattctcttcaaactttaagttgatattgaacagttgtaattttattcagtttctggtagtatcatttgattataacttatagaaagacaatattcaatatatcagtcaaatggtatcataataactactctcaagtgttctatgaaatatcatgtatcatgtatcatatatgttgataggtaacgtacttttgaattaatctggtttgtctggttaaaggagatagttcaaaataaagtaaatgaaaatattatcaataatttgaaaatagagagaatacaactaaaattggaaatcactatattagaatagagggtcaaagtgaaaagttttactcaatattattatttactggggacacccccactggaaaatttgtccagtgcgactggtatcggtacaccccagtggcctccctcaggacgactactactttttcttgtttccgaaaagggtaatctgcaattttctgcgcgttttttttatttttcaaaaattgtgagactgtgttttacaaaatattatatttgtcccatttgggtaagtgcgaggatgtaaaagggtttgtatttaggatgtgaggtacacgtgacagggttatggaattttatctttgcgatttatcgtataactcgtataactcgtatacatcttttcactacgtcgtataagtttacttagtgaaaagagataaaaaattaaatttatcgcatgattaatctcgttccgacacctgttgagccaccttaatagtatgattgtagactaccttcttattgttgaacacgatgaagcgtacgatagagcatatcagtatactactagctatatgctaaatgatatatgatataaattaagatatatctcctccattctatatgcttctattaaatattcaatattgttgttatttttacttcctttcattttgcatataccgttattgcactcatataaatgactgaaatattcaactcaacctgttctagagacaatacaaactccatcattttttaaagtagtggaaaatgtttttgaaactcaaactcatttaaattttgttgaaaaactttgggcttcttggtatgcttatatgcaaaatgatgttcttgcaactggtttattattcttcttagctcatgaaatattttattttggtagatgtttaccttggtacataatagataaaatgccttattttagaaaatggaaaattcaaccaacttatattccatcagataaagagcaatgggaatgtttaaaatctgttttgaaatcacatttcttagttgaagttttcccaatttggactttccatccattgtgtaaatctacttggtattagtgttgctgttccattccctccagttactcaaatgttaaaagaatgggctttattctttgttttagaagatatgtggcattattgggctcatagacttttccattatggtttattctataaatatgttcataaacaacatcataaatatgctgctccatttggtttaactgctgaatacgcacatccaatcgaagttattagtttaggtgcaggtactgttggtttcccaattctttatgcttacttatatggtaatttacatttatttacaattactatttgggttattttaagattattccaagcagttgattcacattcaggttatgatttcccatggtcattacataattttgtaccattctgggcaggtgcagaacatcatgatttacatcatcattatttcattggtaattatgcttcctcatttagattctgggattattatcttgatactgaagcaggtcctgaagcaaaggctgaaagagaagcaagaagaaaagcaaaagctgaacaagctgctaaaaagctcaattaaattaaaccaatgattatatcatattcattttgtaactcatctttctacgcaaatatcttatataaaaccttcatttctttgttcctttgactttctctttatgtatatgaaactactgcactaacatattattatgaaataaaccttataatatactataattgatctgccttgatagtaaacctttccatttgaaaacacagcccgataccaaaaaatttaatctcacatcatgttaacaaaagggagctttaagccttaattattattaatgattatctctttgtaccaactgtctttattaagtgttgcttgaataaggtacgttaactttaatttcatcaaaagaaaaccattaattaagcatcagagcaactatatactgcacaccatcataaaaatacatatctaagatggattctcaattaagattcttcttctttatgttgctattcctttggatcatgtcatctaatcctaatccagaggagaagtacccatcatatatagataaacctgaaatattgaaacaatataaagagagtatgaatatatctagaaatgcattattattggattataatgaaggttatggaaatatttcaggattccatttatcgtatcaagatgcaatcgataacaaaacttcgaaactatatccaatttatgaattaaatcatcattttatagaagatgaaaaatacagtatactacctaactttataagtagacaagctgcaaatatatggaactcagaggatcatatagttgatttaccatcaaatagaaatgattcagaagaagctcatgatggcgttaagtacaatacaggcgcctatcctttaaatattacaggatttttaaaagggaacttccaaaaatcaaaactagagaaccattcattagctccaataaatataacaataccacattatttgagaaaattatatgaatatagattctctgaaagtcaaaggaagagaaatgaacaaaacaacaacgatggttttgacgacggcaatggcgatgactcattttataccgctgagtatccatttgatgatgaagttaaaagagttggcaattttactgacgataatggttccattcgaatatctatttttaatgccaaccctatcgaagatgaatcaaccaatgttttggaacataaaataaatggtacaaccccattatccttttcaatcaaattaaataacgcagctgaaaccgatgaacataggttatcattctctggtgtatatcatcaaaatacaggtaatttagttgttgcatctaattctgccaagtttaacggtttttatgcattaccacatttacaactacaagatggcgcaaattatgaagcagcaaaatggattttattcaatgaagctaacaaaactgatattgatgatattaaatttcaggaaattgaaagtttagttgattcctcaaatgaatgtgaatatatcggatattttcatatggaatcaacaaatcttacaagggaagaattacaaaaaattgattatgaattaattaaccctgttggaagaccacataaaaatgtcccagacttgaaactcactaaaggtttgttatattcaccaaattgtgcaattctgttagaagttggtgagtctgttggtttgagagatcaaatttatgaggatggattaagaaatgttatactcgttggatcaattgtgattttcctacaaattcttgttcttattagacaaatgtcccacacgaatacaccgtcgacattatcaaaactttctttttggacaattgcaataattaacatggctgatggttcactgtctgttgtttcattactttgtacaatgtttttctcagatttatacattcaatttgttgtttgtgcatttttagcattttcctgttctgcaatttatgagatgaaatatggtatacaaatttattgtacccaaattaatgaaagaacaacaagttggagaaccatgttacaaggtataacactcgatgatgcagcaacagcaaacaataatgaaacaataaataatggggcagaaattggaaaccctgaagctactgctgtacctgctgatacaaataataacacaaatactcctgtaccacctccacaaacgcagtttacaggtccagctgatgagcaatccattggcgctgaactttatactagacatttcttttcaatgcttgttttcctgttcgttttactaaatgttatcacttggcctaagagaggtagacaaatatttgaatacattatattaacaatttttaattcatattggattccacaaatctacagaaatacactacgtggatcaagatcaagtttcacatgggagtttgttttatgtacatcgttcttaagattaattccaatcatttatattgaaagttttgcaaatccttttgagcatcatactgatatgaagtttgttttattcctagttatttggctcctattacaaattggattattatttgcacaagaaatattaggcccaagatttttcttacaagataagtatttaccaaaagtttatgattatcatccagttattacgaagggggatcttgaatctggttttaactttgacagagaagaactaattagtgatggatcatcatcttcaaatgaagattcaagaactttgacttatgttactgattgtgcaatttgtatgcaaaagttatcagttccaattttaaacaattctgacaatttagataatggaaatttagataactcatcatcatcattactccccaattctactaaaactgcaatcagtaagaatgcgtctaatttaatagcacgtaggaaatatatggttacaccatgtaatcatattttccacactgaatgtttggaacaatggatggtttataaattacaatgtcctgtttgtcgtaatagtttaccaccatgttgataatattgtttatcttctttttaatgtgtataattatgtttgatacctttttaatgttttgtataataaaaataaattttgaatttagttatggtgagtcatcggaaaaaccgtgtatacatgaacttcaaactcataaattttcaagtcctaaggtttggcaaagtttaacaaagaatcttcatttttaccacattcttttgagctgtttttgccttctacatacattagactaaccataaatataaatgaccgatacaaatagaaagttcaaagcatgtctttttgatatggatggtttactgctcgatagtgaaaccatttacacaatttcattttctgatattcttatcaataattttaatagaaaagaaggtttaacatgggatgttaagattaaattgcaagggttaccaggtgtgcaagcatgccaagttgtcgtggactgttatgcattagagggtgaaactacagctgaagaactatatgcattaacaagtaaaaaacaggaagaattatggccaaatgtcggagttttaccaggcgttgaaaaattaattagttatttaaagaaacaaaatataccaatatgtgtttgtacttcatcacataaagataaatatattttaaaaacaagtaaacatgatgcattatttaaactttttgatggtaatgtaattacaggtgataatccaacaattaaaagtaagggtaaaccattaccatttatttggtggttaggtttagagacactgaatgaaaagtatggaactactattaaaccggatgaatgtttgatttttgaagatgccttacccggatttattagtggtaaaagagctggtggatatgttatttgggttccagatgagagagctttaaatgttattccaaaggaagaaattactacacaggttggagttaataacgaaacatggtgttattttgaaatcattagaggaattcaaaccacaagattatggattgtaataatagagaatgatatacacaatgtattcatatgtgatatctaattagaattgtaagtagatatagattatatatcaaaatttatgaaaaaataaaataggaaactaaaataaaaagcaaatttttgtaatattgatataatttatggttgttttaatttcatattgtgtatgaatttgttgattgggtgtcatatacatatagaaaatatctttatctaatatggtgcatttttgaataagaaagagattgattcaccattatgtaatcttctaattgcttcagctaaaacacctgatatatcaagagtatctaattttggacattgagaaagttttgattcaaatgggacagtatttgtacaaacgactctttctaatcttgaattgttaatatttttgattgcattaccacttaaaataccatgagtaacaattgcaataactgattttgcaccattatctaataaaacatccgcagctttaggctaaagtaccacaagtatcagccatatcatcaacgataatacaaattttatcagtaacatcaccaactaaaaccattctactaacttcatttgcacgagcacgttctttatgaattaaagcaaaatttaaatctaattgatcagctaaaccggctgctctctttgcaccacctgcatcaggtgagataatgattgaatttctaatgtctatcttttctttgatatatctaacaacacttggttctgcatataagttatcaacaggtgaatcaaaaaacccttgaatttgtgatgcatgtagatccattgtaataacatgatcacaacctgcaggtttctaagcatatcagccattaattttgcagtaattggagcacgagacttatcctttctatcttgtcttgcatatgggaaatttggtaaaactgctgtaattcttctagctgaagcagctttacatgcattaatcatagttaataattcgaaaactttatcattaacaggacctgcacctatttgcattatgacataaatatcttcatctctgaatagattctccaatactgaataaaacttccttattagactctctcttaaattcaactggtgtaagtggtaaacctaatctttttgcaactaattcagctaatccacgatcaatatctggtgctaaaagtttgatagaatttgtagacatttttttctaaaaaaatttattgactataatgtgtaatgttttatatattggaattcaaaccgatactaacggaagagatataaatatgaatctaaataaaggatggatggggggatagaagtactgtaaaggtccttaacaataagcaaatcatgaactaacatgtattcaacttcaatcaaaaatgaaaataattttttttaaaattaaatttcacaaaattcatgcaaccccggtcatttcctcaaattgtaaatttctatggggaagaaacaatttttttttataaattttttttttcatttcgcgacactgaaaatgttgtgtcaaatctatgattacataatactgtacatgaaacgattaattaacgcatggcatgaaatgatgaacctaaggagtgatatatttagtgctttcaccattagcacacaactataatgtcatcagcaacagctaaaaattacaagaaacgagccatactgtatgaagatcataaatacccagaaaacagtactcaaaatggtaagaaacttaaactacctcaattattatcatataaattaccagcagatttaatgagtgagttaaatataccacaattaacattagaggaattgaaaagtaaattaaagaaaaaggataataatgaagatagttcaaatgataatgatataatagtaaaggtgaaagtaagtgaaacaatgacaattatcaaaaagataagtgatagagctgatgctttgaagaccactgcgataaaggaatttggattgaaacattatgaaatatcattagtttctttttcatattcattcttattaacagtattagcattaagatggaatgaaattgaaaggaatgatgaaattaattataaattaaataataagttaaataataaagaaattaattcattaattttcataattacaaggaaggaaacagattggaaaaaagttttagattatggatgtaaaataattgataatttcaagaaaatattaaatattgctaaaataaatgattcaagattatttaatgttttatcacatttattaggtttaatattttatggtaatggattaattgaactatatttaagtgaattagatttacaacatattaatttactgaaaataaaaatagggaatcataaaaatgaaaatgaaagtttaattgacttataagaaaataactgatttaattgaaatttttgaaaaatatagtcaaaagagtaaagaatctttcattgatggagagaaaaggttaggattattcataattaagaaagcgtatgatgaattatttaatcaaagtcttgaaagattatcacaattaaacaaggatgaacttgtactatctagaaatctcttatttttaagtggtaaggagaataaatttaaaactggtgttaattattgtttaccaatttgttcacatacatggaaattagataatctcattaattttggaggattttttatcaaaatatggtgtgaaagacagtcaattaaagaaaatatgattttccaataaatataacttaatgaatagaatatatagtatcaaaacttacataaataatttaataagacacaaaataaataaataaaatgaataaattaaagtaaataaattattcacctgaagtatcagggaataaaaagaatgatattgcgataatgaaataagttgcaattaataaaactccttcaagccaatttgaactaccatctaagataagagaatttgtaatgaaaacagaaacaaaaataacggcagtttcaaacatactaaaatataaactcatttccacattcattgcccaaccaattaagacaagtaaaggagtaacaaagattgcgatttgtaaacttgaaccaattgcaacaccaattgctaaatccattttatttttataagcaacataaatagctgtaacatgttcagctgcattaccaacaattgggataacaattaaaccaataaaagttttagataaacctgaagattcaacaatttcatcaattgtaccaactaaataatccgcacaaattgaaacaaaaattgttgaaataagtaaaactaaagttgctgaagttgttgataatgattgatcacttgtaatatctaaatcataaattgattttggtcttgttaggaaagaagcagaattacgacgattattagaattaattgaagtactttcagtatttgaagatccataataactttgaggtggatttaattcatcattgttatcattgttattattactttctaaatcaacattaattggtaaattaactatttcattattagtattattattattttcatcagagaataaataagtatgagttttcaattgaaatatcatatagaaggcataaactaataataaaacaattgaagtaccacgagataaatctaaaattttatcatttaaatgtttggttgattttggtaaagaagcataaaaagcagcaggtaataataaagccataactgagacagctaataaagaacccattgtttgagctgcagtttgattaaagaattgttctctaaattttaaaccaccaacaataaaacaagaacctagaactaatagtaaattagataaaattgaacctaacattgaagcttgaacaacagttatttgatttcctttaatgcaataactgagacaataacttcaacagcattaccaaaagttgcatttaataaacctgcaattgaatcattatgaattgattcacccaattcctcagttgcataagctaatagagaagcaagtggtataattgcaaagaaattagccaaaaatataattgaaggtgataaatggagtttttcggataatatacctaatggtacgaataataataaccaattaacttttgaagattttaaagttgttgaacatgcattgttaaaggaagtgtaaatgttttcattatgatgatcttcaggtaataagacttctgattctgaagacattgttgggtatatattcagtagggttcaatgaggtgggggagtggataaaggagaaaccggtcgatgatgaatagtattaatttagttggaccctaaaattaatgattaatttgagaaagttggaaaaaaaaaattctcgcaattttaggtttgtgcatcggaattttcagtggtgatttctctttctcttgaagctgagccttcattaaataaataatagcatagtatactataatatagttagattgtatctaagctaaaagtaatgtcatatcaatgagtataaagatgttatagtgaactatagttgacaaactaactaatatcaaagtaagaaaaatcgatgatgctggtagtatgcatacaagtatgtacttcttacagatacaacattgctatttacaatttctaattgtatacaagatagcaatcaatcaactaatgatactctaatccaaccctaaagatgaaacaagaataagacaataagcaaagggtatctgcaagggatgaacctggtaaaggagagagttgagatgaaaatataataggaacgcgctttcagggtggtgggaacgcgtcttttaaaattttaaattgggaaataacgcgtaatctaatcttttaaattttcaacttggactttgggcatctatttcaataacgactacaaagggtaataatattatcatcaatttcataaaatctttcaccatccttttgttcactttattactggtcatatttcctctttttttaagttaattatcttctattttttactctcactccttttgattaagtcgattaagttgattattaactaaacttcactactcatcacttctttttgctttgctttggctataactctatatctttttgaactcttttatctcatcacatttgatcttatcatatcacatctcataccaacaccaataccaatacacatgtcagatttagaagccctttacatatttcttaataaggaaataacttcagaaatggttcaatatttagttgctacaacttcttcaattattcaagttaaaattactgaaaatgattcaattgaaccaaacccattaccttataactctaattataccaacaatggattacaaactccaccccaatctccaactgaaaatgatttatcaacaattaattataaaattccatctctttataattttattaaaaaacttattcaatattctcatattcaatgtacaactttaatgacaactttagtttatttaaataaactgaaaaatgttatacctccaaattcaattggtatgattacaactcatcatagaattttcttaggttcacttttattagctgctaaatatactaatgattcaagtccaatgaataaacattgggcaacttatactgatggtttattatcattacgtgaaattaatgctttagaaatggaaatgattcaatatattggttgggataatttaagatttcaaaattatgatttaattaattcattatcttatttcttacaaccaattaaaagaaatttaagattaaaatctgaaaataatttacaaaataaaatttcaaaaattaaagcttcaaatccttcacttaatttgaataataatataaaaattaatactaatactcaaaatcaattatcagcttcttcaacttcttcttcattaccttcctctaatatcatcatcctcatcatcttcaacaatctcatcaatccaatcttcattacctagaaaagattcaattcaatcaattgattctatttctaatgatacttcaatatctccaaaaataaatattacatcatcagataagataaataataaaaataatgatgatatatcactatcattacgtccattacgtttaaagcaaaagcaaaattctaaaaattcagaaatacccaataataaaaataataacaatacttttattaataaatcaaagagaaattcaatcaatcttttaccaattaaaacttctccaactattcaaccactttcgttaaaacatagcaggaaatcattatatctttcctcaatcaataataaccaaaacttatcaatcgttaattaatcaattgattaaatattaatactaaccgacccccctttatttgataccaattttttcattttatttcaattcacttccctactatttacaattcgtttacttacactcctatttattcttttcacttcgtctttttgaattttattttttgtaactaagtttatattcaataactttgaaaactgttctaaattcgtcatattaacattatcacgtaaatttactatactaaatattatattaaataattttttttaaaaaaaaactaaacaaaaataaaagaaattttatttattcaatctaattgtataaatcatcctcctcttcttctgcattaccaaaatttgctccttcatttgaacctccattaataccttcaacattattggttgaacctgcaccattattagaatcagaatcaaatttaaatgaacttaattgacctcttgatgattgtatttgttgtgcatatgcttcatatcttcttaattcagatggtgaaacagatttctttgcagtcttcattgcctcttcaaaatgtaatttggaaatatatggaactggatctggttgttcctccatttcaacatctccattttcttctttcttaatcttactttcttcatataatttttgtgcttcaattgattccttaattgcaaattttgcagctctttgaacaatatatgataaatctgcaccagtaaatccattagttaatttagcaattgctctaagttctaatcctggttctaatggagtctttcttaattgtgctgataaaattgataatctaccttcctcatctggtaatggaacatatattaattgatccaatctaccaggtcttaagattgctggatcaatttgatcaggtctattggttgcaccaataatgaaaacattcttctttgcattcataccatccatttcagttaataattgattaacaactctatcagacgctccacctgcatcacccatattaccacctcttgctttagcaatagagtctaattcatctaagaaaacaacagttggtgcagcagctctagctttatcaaaaatatctctaatgttagattcagattcaccataccacatacttaataattcaggacctttaacagaaatgaaatttgcagaaacttcagttgcaactgcttttgctaataaagttttaccagtacctggtggaccaaagaaaagaacaccctttgatggtgataaaccaaatttggtatattgatctggatgtaaaacaggatattcaacagtttcctttaattcttgtttaatatgatctaaacctccaatatcatcccaagtaacattaacactttcaacaacagtttcacgtaatgcagatgggttagagttaccaagagcaaatctaaagttatccatagtaacacttaatgaatctaagacttcagtatcaatattatcttcatctaaatcaattaactccatcttttctctaatttgttgcattgcagcttctgaacataatgatgcaatatctgcaccaacataaccatgagtttcagatgcaattttttctaaatcaacatcttctgctaatttcatgtttttagtatggattcttaaaacttccaatctaccagttgcatcaggaataccaatatcaacttctctatcaaatctaccaaatcttcttaatgcaggatcaattgagtttggtctattagttgctgcaataacaacaacattagatcttgccttcataccatccattaaggttaataattgagaaacaactcttctttcaacttcaccattagtcttatccctctttggagcaattgaatcaatttcatctaggaaaataattgaaggagcattcttttcagcttcttcgaaagcctttcttaaattagattcggattcacctgccattttagacataatttcaggaccattaattaaaaagaagaaagcaccagtttcgtttgcaacagctcttgccattaaagttttaccagtacctggtggaccatacatcaaaataccctttggaggtttaatacctatagctttgaataattgaggatgtcttaaaggtaattcaaccaattctctaatttgagccatctgttttctacaaccaccaatatcatcataaccaacttcattcagattattttcttcatcttctctattaattggttcaccttcagaatgtattatagtatcttgagagacaattgcataatcctcaggttcaacttcaacaactttaaattcaacttgtctcataccacctctaacaatgaaatgatcttcttttctaacaggtctataagcatcaacaaaataaggttttaagaaaatatcaaataatgaaccagttaaaccttcaatggtatcagcaattggtaaaactgagattcttgaagcaaatttaatatcaggacatggatgaattgaaacaacatcacctaatctaactcttaaattatttcttgaaactctgttaattctacaaacaccatcctccatatcatcatcagctaaaacaactaaaacagtatcttttctctttttacccttaactaaaacggcatcaccacggaataattctaatttttccatagtatttgaagacattgagataattgagttatcatcattggtagcatcatcaacaataagtgaatttgccttcttctttcttcttaaaattgcagttgcggtactatcttctggaccagcatcagcaccagatgcatctaataaaggttttttctcgtcaaccattttattgtttgaaaagatggataactagaaggaaataagaagaaatacaagatcaaaggaagagaaaccgtgaaggcaaatttcaagatttgagtggcaaaaagttggcaagattgttgagaaagagagattgataattaatttactatgagcgaagtttccacagattttaatgtgattgcttacgtatttttattttgttcattactattcatcggagtgacctctactttcaggatgtttaactgctttcatggttttacttcattatatatctgtatctaacaataataatggcatctgcaatctcacacgaagcttcatgtattttctgtaaaatcattaaaggtatgtctcaatcgtcactttaatctcaatcttttttactgaatctcatatactaacatttcaagcttaaatttatataggtgaaatcccatctttcaaactgattgaaactaaacattcatactcttttcttgatattcagccaactgcaaagggtcatctgttagttattccaaaatatcatggtgctaaattacacaatttacctgatgaatatttagctgatattttacctgttgctaaaaaattagcaattgcattagatttaaatatcgattctccagaaggtgatggttataatattttacaaaataatggtagaattgctcatcaagttgttgaccatgttcatttccatttaattccaaagagagatgaaaaaactggtttaattgttggatggccagcagaagatgctgatatggccaaattaagtgagtttgcaaaggaattacaagcaaaattatgattatttattttatttgatttaattaaattatattttatttcatttttataaaaaaattagttttacaattagtaatgaatgatattatgacatgattattactttttttttacctacaatcctaccatacctgtgacttgacgagctcctgcattaaaaatcatttgcatagtttgagcaccgaatgggaaataacttgcagtataccataatattgccattatttcaactatacccattaacaaacttagtatagtatttttcaatacaactgcacaataaattgtagaaatttgacttaaaacaaaaacaactgtaaatggtaaacgttccttacttgctaaatgtttaatataagctactggtccctgtaaaacaccaaatgataagaaaaataataatgaacccaatgtccataacataacgaattttcttggctttaatgttaacactgggaaaagaaagaaacctaatgcaaaacatgcaactgatcctaataataataaaataaatcctgcatatctttcaaatcttgatagtttgaaccatgaaggttcttcagtattaccaccgaatatatctgatgtgttcaatggtaagacattttgtgcattatctaatgaatcttgaaatgtgttactgatatttgatccaatatttgaaaaccatgacgatgctgcacctgcaatattactttcgttatttgaacgtgtgttcctccaattggctagcacatcagcattttcagacatgttgaatatctataccccaaacaacttaagaatcaaccatcgatcccaaagacatggctgataattcaagtttttttactttgttgacattcgtcgctcggagataaatcttttgcaatggttttgtaccattttctacgattctaagatatatagataagcagcataaatactcgttaaagatggatactatatatataagaaaatatacataatagataatataaaatgattagaagtgtttttacatcacacctgatatatagttcagattccaaacccgttggaatttggttctttgaataacagttgatccaaaaaatcagtatcattagcaaacttcaaagcaggtgcttgaaaattatggaattcattgtttaaaggatcagtttccttagcattgatatttccattgtaaatatcactatcgccttcattataaccgaaattcccaggtactccagcattctcatctcgttgattatcaaatgttaagaacgcatccatgttatcagtatttagtggattattgttagttccaaatgattcagacaatttcctaaaatccactggttcagattttgagtttgaaagatccatgaaatttagtttggaattgttagattttaaattaatgttttcggtaaatgctgataaagaatcttgaattttttcaaatttagcatcttgttcattggtcctagtagagtcatatgtattataagagttataatcattgcttagcagtcgcattagctgaaccatcattataatttatttgtgattgatcatcgtttggaatttcagtcccgctcataaagtttttcacatcttgcactagattttgttcttctgtttgggtattttcaccattaaatatttgactattaggttcattcaaatctaatttttctatttcatcttctaattctgccaactttttctcctgagcttctaatatcttttgtagaaactgtatatagtcaacagttttaatcaaaataatgtttttatttgctttgatttctttattaggatttttacatttaacattatcatacagtaatgttggaggtattaaagttcctaattctttaattttttccttaatcaaatctcttcttctcctttcaacagcattatgtaattctcttcttcttgataatttactttctttacttaaagcactcttagaattaacatgtgaagaggatggtgatgccatacctttaaaacttggtgagttcattggtgatttcaaactatcatcattaaatgaaccatatggagagtctaaataaccattcataagttgatgaaggtgatatcaaattatttaatgacgtacctaaatgtgatccataacttctacctaatgtgttggacaatgttttggtcaaaaaattattgttgtaactagtggaaaatccaaatgattctggtgaaaacgtatcagctttagttggcacatctaatctatttaatgaatctgctaatagtttcgggctttgataactttcatcattcgattgcgtatcgttagctgggaacatattatcaatattatttattgaataactatttgaattattattactcaaattcattgacattatttcagagttattactgttgttcatattaccaaaattagaaatggaagttgtaagttcaacaggatcaaaattaaaatcagaacctatattatcattcattttattgaaatcaatgtttgtcgatcttgaatctttatctgaatctcccatgtggttgtttgatggcatcagaccattgatactacttaaattatttttatcgattgtatttaaattggagttatatgtcaataaactattgaatttttcatcaaataatggatcgttatcatcttgaggcataaatttgttttcagttttcactttaacgttagaataagcattgtttggtgataaagtagtgccgttttggccagagaattgcgtatttggagagtcaaactcttttgtattgaaataaggaatttcggtcgattctgtttcgctaccgtccatcctttatatgcagttagggtatatgtgtgtattatttataagatagtagatgtctatgtattcaagtacgagatgtagatgttcagtaaatataatttaagaagaatggtgaaggtaaaagttgcggaaaaccggtgagcaaaacagtagttaaattaaggaaattttagaatttattatgtaatgcgtatattcattgttcttaagttagcatgtgcagcttggtatatattacagggtgtagtatcaacaatttagagttactcttagcatttgtgatacatcaaataattttatgatttatatataaaggttggattggccggttaaatatatatctgctatacattgatcatcattatacaactcacaaaatagttttacagcttagtgaacttttgttctgaaacatcagatgaaccacccttgctgtttccatatttagtttctaaatgagaccttcttatcatacctttgagtgaagccatacctgatgatggtgtacgattatggaaacccaaacttgattttctggtgaatttttgataaatatgaccaggtctctttttgtcttcaagatcaaaaaacatcacaacttcttcatctttggaacttactctggtgtgattggtaaaacttgctgtatcatcatctgtaataaaactttcaccttctgttgtactcatatcttctgtggttaaccttcctgtctcaaatgattcctttttatactttcttcttctgggtggtacatgtttaggtgacgtaattggagggataatagtagattgtggtaatggtacatctggagtctttgatgtgctattttgatcagaatcaaaatcataatcagaattcacaacattaattaattcaagttttggtattgattgatcagttgttttattcttctgcataattggaccaattcttgatatttttgattcagtggcttgttttgttgatgatgttattgaggaaagtgtttttggactatccatataatctttcaaatctttcaaattgatagagctagcactaataaagtcatcatcctttctattaactatatccaaggcaggaatactcatttctcttttctttgatctaacaggtggttgagcattttgaaggaatcttctgttgtgtgcttgtgcagccaaacttactaatttagaaccagatttttcactatttgtactttttgcacttttcaaactaccacttttagaacttccaccttcatattttgtcccagttttaccactacttgtatatgatgcatttgatggcaaactttcaaaaggtattggtgaatagtaatctgaagcagaatctgaagatatttcttgatgtaaaggtgagtatgcatttgtcgattgattatttaaatctgtttgaattggagtttttggtactcttgatcgaggtggtggtgagtttggtattgtgttttctttttttatataacttttaagatgtatatcatccgataagttgaatgtgtgattttttcttcgtctaatgatttggctgttctcataattaggaattgtttcaattgcttttatttctactgattgctctaattgtggcaatcttagaatataatcactgtctttaaaacgtttattatcaataaatggattctctgtattagttttgactcttttcttgtccgactttttaaccttggtttcatcaaataagttggtagaatggttatcattgttaaaggtatcaaattcgttaaactcactattactgtagtcgttgctaatattttgtttagtagagctgcttttagcattttgaataggtgaatttattggctctttgaaaacttctgttttttctgtgtctttcaaagtgacaccatgatcagattgcctttttaatttaattccatccactaaatttttattagtctttcttagctctgcttgattttcaagattttcatatttttcagctaaccttctatacctttccataactaccaaatcatattccaaaatagcatttgataaaagtaaattctttctctgttcttgttgtaatgactctaaacttgtatttttcaaatccacatcaacggcatttcttgaaaagtattttcttatcaggtgtaaccagtaaatgataaaaggttgattaacttctggtttttcttttgtggaataatcagtaaaaaaattggtttgaccatacggcatttttgcgtaagtttctcttttaatctcttgtggatcattattattaactttagtgtagttattatctccacaaagcgttggtaacatcattgtttatggagtttttggataaaaaagaagttttaagaacttaaactccaaacttgaaggaaagtactgtttagttgtatcttaaactagagactttattttaaatgttctttccatatatgaatcatttttgttccggaactatcttatcgtgtgttctttttctgcttccttatatttctggtagccaaatcagaatattttcagattaaaaaaaagcgatgctctcaacggaatgttaataagatttttagaatttatagtatcaaactaggtattgtgataaaaattttttacttttactacacctgtataatagcatgtagctaagacttgtaaagtctacattctctgtgtccacttattgggagagacttctctctctcccttccgactgaaatacatcacgtgactaatatctaacgtgaaaattttgattacctaataaaaagtttcaattactaagtaaattgaaatttcagtggaaacaatattttttttcttaggaaaatgctatcaattacccaatgttttgatcagacctttattgatagaaaaattatcgtgttttcctctacaaattatctaatattgggcatttatttgacatttatttgacatttatctctattttattttactttaaacttaacaattagccatgcctcccaactctgctttatctgggcctaattcggtgataaatcccacaccagaagactatgcagaactacaaaatccaagagaagaagcttcttatacaaaattttatagagatctagatcctgatgagctaataccggtttatcaattttccactggtaatgtatatgaatcaatattagataattcacctgaaattgaaaattttaattatagacaagaaagagttgatcgaatacgacatagtaatttgaaaacaccaaatttcaggaaaattccaaaagatgagctggaatcacaatcaacagctttaacatctgaaatgttacctgatactaaaaataatataaataaaatacctgataaatctaattatattaattcaaatacacttgaaaaactgggatttttcaatttacctattgataataaatcaaaattaaatttaccacaaacgtatcttagacctgatttcaataaagatcaattaactcgtgggaaactaatgtacaattccaaaaattttcaagtacaatatgatatggatgagacagatttactatttattaattggattaatgaaattgcaaaggaaaatatcacaatggaacaatttgaaattataatcacattcattgaaataaagttatatcaaattgaaagattattaccaccaacaattaaagatcgttcaattattgattatcaacaacaacatcacgctttattatatggatctgatgatggtacaggatttgttgatcaagatgaacaagcatgtgcagtttgtgaatcatcagaatgtgattctacaaatcctattatattttgtgatggttgtgatatagctgttcatcaagattgttatggtgtttcatttatacctgaaggaccttggctttgtcgcaggtgtttaattgcacgtaataccactgaaaaatgtttattctgtccatcaacaactggtgcttttaaacaaactgatagcggtgattgggctcatgtattatgtacgttatggactccagaattatattttgctaatccaatttatatggaaccagttgaaggtgttatgaatattcctaagagtcggtggaaattaaattgttatatttgtaaacaaaaaatgggagtatgtattcaatgttcaaaaccatcatgttttgcagcttatcatgttacatgtgctaaaagagcaggcttttatatgaagtttaaaaaaggtgttaaagctgcagttgataataaaaatacattggtgagttattgtgataaacatacacctaacgactggaaagttaatcataatgttataaatggtatagagaaaacaagattatattttcatgataaaagtagagatagtttacaaaatgatgttaataatgaattaacatttgtcactaatgaagagtatgatgaattgattgcaaccaattcaaacgattttaaatggagatataactcaaatgtttatatagtaccgtcaattataatagatcaattaattgaattcattagattgaataagttaccagaaatagaaagagtaaccttgaatcagattgctaaatattattcattgaaaaggaatcatatagggaaaccattaattaaaagaccggatgttttgaaccatgcaagtatacctgaatcaatcttaacaaaaagagatgcaacaattgaatttttccaaaaagatgtcagccatttacattatttatctaaattaatagttaaaagaactaaattatgtaaatctctagttgatgagaaattagaagctgcaattttacttaataatcccaaacaatgggtgtttaacaatttggtctcatacttcaaagcacattttgttgaaattgaaaatagtacaggtatttcattgcctagctttcctaaatatgcagttaaacctacaatctatcaaatcattgagaatgcagatgatgtaaaatatgaaagcattgaagatttgattaatgatattgagaaattttcaaattggatattaaatgtgaatttaaatattaactctccattaaatgaaattcagaagttattcagagcatggcaaagatataaaaaggctaaatatcaaaatgcaagagaatattataaattagttattgaacaatggggtaatttaaaatcacaatttgttcaagaggatgagtgttcattatcattggcttacacaccaagtgaaagtaatattgaaaatggtgagtttaccattgttccaagaaagaggaaacgtaaaaatagtggaaaaagaatggggattgatatatcacagtttgaaaatggtgatttaacatcaactgaaagacatttaagaacacgtaagtctgctgttgatagtgataaaattgaggagggaaaagaagaggattatgttgataaacccaaaaatgtattaaaggcaagacttgatagagtcaaacaaagaacaaacgttcaaaatttaagaaaaactagaaggaataattgaaattagatttgtttgtattattagtaaaatgataaattgtgtaaaataaatgtactttactctagattaaaatagttaatgaataggaaaattaatagaaataagaagtgttattattataaattaaataaacttaacctcacttagaaattatgtgtatataaaaggaaaatacaaggatttaaaacaaaatataaaatttagataagaaattagtaattaaaaaatcacaatccttataatttgtcgtaatattcttcgtaacctggaacagcttcctttaaacctctcttctttcttgcttcaagaacaatttgacctggtttagatgaaacatcagttggatcaccacccatagtatcccaatgatcaaagatcatttgtgggaaagcttgaccaccagttgcttgtcttaattcaccagtgaaaccgaaagattcattgacaggtaagtatgccttaacagtgaataatggagtacctggtctttgttcttcagaaacaacttgacctctctttctgtttaagacagagtaaataccaccaatagcagattctggacattgaatttcaattaagaaaattggttcttggattcttggttcagctaataacatagaagcataagtaactcttctcatagttggcataatttgaccagcacctctatggatagcatccgcgtgtaaagtaacatcaagaatgttgaatctaatacctctaatttgttcacctaataatggaccttccttagatgcccattggaaaccagagttaacgtgatccttaatttcgtttaagtattgaacagccttggtttcatcaacaacaacgttagcaccagtaccatctggaccgaaacaccaaatctttcttgcttcagtaacatcccaaccatattcatcagccattaatcttgctctgacctttaagtcggctcttggatcaatgataccgttttcaatagctaatgaaacttcttcttccattggagcagcctttaagtaaattctgttatgcttgtttggagatttagataatgcaggaattcttgattcaccttcaacggtttctctataagcaacaacaggtggagaaatctttaatggaacaccagcgtgatcgttttgtaaatcacctaaacaaatttctaaatgtaattcaccagttgcagcaacaatatgttcaccagatggggacatgtaacataaaacacatggatcggatttagataatctctttaaaccttcaactaattttggtaaatcgttaccgttcttaacttcaacagcgacttggacaactggggagactgagaatttcataaccttcatgttgtgtgcggtttcagaggtggttaaagtaccggattttaataagaattgatcaataccgactaaaccaataatgttacctgctggacaatcatcaatttgttcaacggatcttcccatcattaaaacagttctttggatagctttaacgaataaatcttccttcttaccaacggcatagtttggaccttggattctaaccttttgaccagatttaacagtacctgcaaaaactctaccgaaagcgtagaatctacccttatcagaggttgggaccatcttggagacgtataacattaagtctgcctttggatcacagttcttaattgctaaacaatgttcatcatcagcaggaccttcatataattgatcagctctataagcttgagcggtaactggagatggtaagtgaataacaatcatttccaacatagcatctgctgctggtaagaattttctcataacaaccttcattaaagctttaccttctaattctctttcttcagactttaagttaatttctaatttagttaataaagtatcaatttcttctttcttgaagttcataatggagttgattaatctgaaaattggatctaaaacgaacatgttgaaagctctttctaattgagcacctgaagcatctttatccttgtttgaccatttcttagtctttgggttgaagaaagaatcaccccataatctttgcatcatcttctctctgtcaacaccgaatttcttggaatatctagtagcaaattgtctaacagtgaaagcccaaccgtgtaaaccggaaccgaaagcaacggtacccttttctgggtaaacttgacagtcacctaaaactttatcgtggtaagttgcaataacaacgttaacggattcaacagttctggagaaggtttggtataaatcttccttagaaatttgtaattctaacatagctctatcaactttgttaataactaaaactggcttaattctttcacctaaagcttgtcttaaaacggtttcggtttggacacagacaccttcaatagtatcaacaacaaccatagcaccatcagtaactcttaaagcagcagtgacttctgaagagaaatcaacgtgacctggggaatctattaagttaattaagaatttagcaccatcagttttttgtttaatttctttaacatcatcatcttccatttcagagaaaagggagatagcagtggacttaatagtaatacctctttcttgttcatcttttctggtatcagtgaatctagcttcaccggctttagcagcagaaataatacctgctctttggactaaagaatcggttaaagtggatttaccgtgatcgacatgggcaatgacggacatgttacggacgttggtaacacggtccattaaatctctaatttgttcaacagtgaaattaactataattaaataataattgaataccaatcaagttcaattcatttcatactaataaaattaatctttactttgcatcttaccaaccatctattaacataaactaatatttgtgataaccatagtttactacattaaaattccagcgaagaaaaaaaatttgcaaaaaataaaaatttcactaatatttttttcagtgctaaaattttaatatggcggtaccaaaattgatcaaattatagtgtattaggttaatgagtgagtaaagtgcaaagtaagttgtaattcttattagtagattgaagtgaaaataaaattaaggtaatagaataatgttagtatgttgaaccattttgaaagtaaatttaaaaggcaatctattgtcacaattacagaaaattctcaaattaattttttaacgttattaaggaattatcatcagtttgagaaattgtgtaatattacaatgtgattgattttcaaggtataagttgcaatatacgtacccattttgagagttgattgaggtttgtggaactgaagaaagcagaaaggtaaaacaaaataaattaaaagaatgaaaaaaaaaaaggagaaaggagttaagtaacttaattataaattaataggcaaatggaaaaaactggtgaaatgaaaaaaaaaaatcaaattgttgtccaacaatatgaaaattttttccattgagagcgaaacttatttatttattaaccgggtaacttagtcgcgtctttgattatgttgctattattatactactactaatacacatgtgcaagctaactaacttaataaccagatgaaaacaccttgaatggcaaaacaatatgcaaagaggcattgtaatttgattctgctctctccactaccaccacctggtaaaacaacataacgtaaactacgcatcatgaaaaatccatgtgaaaatactaataatgctaatcctaagtatcgtataacaactgaattaccacttgtgatttcaataattaataatagtaatattggtacaaatttatatccagtataacttaccaggtcccataatttactattctttgatccaatacctaaaatgtaaaatgatgttcttaataatacaacatccatcatataaaatgctaatgttcttgtagttgcatatccaagcatttcaggatgaaaatcacctctcataccagcatctaatgcccataataaaatatatgataaaaatgccatacttggaatatataaatctggtgcattaacatcgtcgataggagttgcataaatatcaccttgtgcaacattaccattattattaccatttgaattaaaagtttgtctaatccaacttttatttctatatgggaaaacaattaataacagtttctttaaaacatatgcattagaaactttaaaataatatttaatatcttcattcccaacaatttgttgtaaattattttgcatatattgttgtgatgcattaaatgcactttgagaaaattgtaagcccatttgtgatgctgggtcattgaaaaatgaattcattccacctgacactccacccataaaattattattggatccaaaaccatttcctcctactggttgttgaccagctgcttgtccttgattatatggatttccatttggattaccaaattggttggaatttatattatttgtgttgaattgttggttatgtgttccacgatgctgtggttgttgttgttgttgataatgattttcatattgattttgtccaattggttgtgcattacctgctatatcatcatttgcttgagtatgatatggattgtacatctctatatattgtccttactaatcaattgttcctaatagcccagagatttcacactaatagatatcagatcagtcatgaaaggtacaaactaaaatcgccaaaattcaaacctgagacaccacccatcccacactaattacattgaaaattattgaaagtgtcagcagcaaagacgcgtctggtttcttacgtaatttttgacgcaaaaatcccaagcacaaacacgaaaagttgaagatggattctgaaggaattaaaggtattttgtgaagtttcgaaagtgtttagttcatataataaaacaaattctaactctacatagaatacatctttaacaaaaaaatgtcctcgaagagctctaataattttaagggcgcaaattcggctcgttatgttaagaataaacaaaattttaatggtgataatgaccgtgataaatctgattcaaataatgatagagcaaatccttttaaaaaaaattataatgacttttcaggcagaaacaaaagtggtaaatcttttgaagaaatagaaaatgaaaagatggttcatgttagaaaagttaataaaatagactccatatttgggtttgataagtttgaatctggtccaaagagaaaaggttggttaagtaatatgcattccaccttaattcaagatgatgagcttcattctcaattatcctgcgttgattattattttttggatgaagaaggtggatcttttaaagtttcatatcaatttgctccatattttttaatcgtttgtccaactgataaagaaattgcattggaagaatggttaagaagaactttagaatcaattgttaaaaaaatatcaactgtcaagaaagaagatttagatctagataatcatttaactggtaaaaagagaactttagtcaaactagaatttaacaatatatccgatttattaaatgcacgtaaaattctacagccaatgataactaaaaataaagaaaagaaagaaagtaatgatatctatagatctgttaacttgaattataacaatataaataaagaaaccatcgaaaatgatgatcttcttatggatatagatgctgatgaagaattagattttaaatataatgatgcctctgaattgatgttggatatcagagaatatgatgttccttatcatgttcgtgtatcaattgatgaagatattagaattggtaaatggtatgatgttgaagtaacaccatcagaaacaagaattatagaagataaagaaaaaattgcatttgctgatccagtggttttagcatttgatattgaaacaacaaaagctcctttgaaatttccggtcttttctgttgaccaaattatgatgatttcctatatgattgatggtgaaggtttccttatcactaatagatcaattatttcagaagatatagaagactttgaatatacacctaaacctgaatatcccggtgaatttatgatttttaatgagccaaatgaaaaagctttaattgaaaagttttttgaacatatacgaaatgttagacctactgtcattgcaactttcaatggtgatttctttgattggccattcgttgaggcaagagctaactatcatggaattgatatgtttgaagaaattggatttgcaaaagatgcagaaggtgaatataaatcaagttattgtactcacatggattgtttccgttgggttaagcgtgattcttatcttccacaaggttctcaaggtttaaaagctgttactactgctaaattaggttataatcccacagaattagatccagaactaatgacaccgtatgcttatgagcatcctcaattattagctgaatattccgtttctgatgctgttgcaacttattacttatattataaatatgttcatccattcattttttccttggcaactattattcctttgaatcccgatgaagtgttgagaaaaggtacaggtaccttatgtgaaatgttgttaatggttcaagcttataaaggtaatattttactcccgaataaacatacggatccacctgaaagattttataatggacatttgcttgaatcagaaacttatgttggtggacatgttgaatcattagaagctggtgttttcagggctgatttgaaaaatcattttacagtcgatccaactgctgttgatgaagttattgctgatttaaaaaattctcttaagtttgctattgttgttgaaggtggaaagaagatggaagatataacaaattttgatgaagttcatgatcaaattagagatcaattgttgaaattgaaagaaaatgttaaaagacatgaaactcctttaatttatcatgttgatgttgcttcaatgtatccaaatattatgacaactaatcgtttacaacctgattctatgaaatctgaagaaaattgtgcagcctgtgattttaatagacctggtaaacaatgtgatagaagattaacttgggcttggagaggtgaatattatccagctgaaatgaatgaatataatatgattaaaaatgccactttgagtgagctgttcccacctaaatatcctaatggaccaaaaaggaaatttgaagaattaccttatgctgatcaagttgctcatttaaagaaaaaagtttctgattattcaagaaaagtttatcatagaataaagtgtacagaaactgttgaacgtgaagctattgtttgtcaaagagaaaatcctttctatgtagatactgtcagagatttccgtgatagacgttatgatttcaaaggtttagcaaaagtttggaaaggtaaggttaaagatattgacccatcagataagcattcaattgaagaagctaaaaagatggttgttttgtatgattctttacaattagcacataaagttattttaaactcattctatggttatgttatgcgtaaaggttcaagatggtattccatggaaatggcaggtatcacttgtcttactggtgcaacaattattcaaatggctagagaattggttcaaagatttggtagacctctagaaattgatacagatggtatttggtgtattttaccatcaagtttcccagaagagtataattttaaacttaagaatggtaaaacttataatggttcagtatccttgctctatgttgaattatttagttcatgaaaaatttaccaatcatcaatatcaaactttagttgatgaagaaaaattcagatatgaaataaaagcagataattctatcttttttgaagttgatggtccatataaagcaatggttttgccaacatctaaagaagaaggtaaaggtttgaaaaaaagatatgcagttttcaattttgatggatctttagcagaattaaaaggttttgaattgaaaagaagaggtgaattacaattgatcaaaaatttccaatctgatatttttaaattgtttttagaaggtgaaactttagaagggtgttatcaaactgttgcaaatgttgcaaatagatggttagatgttcttgatacgaaaggtaagatgttggaagatgaagatttaattgaattgatttgtgaaaacagaagtatgtctaaaaagttatctgaatatggaaatcaaaaatctacctctattactacggctaaaaggttaggtgagttcttgggtgaagaaatggtgaaggatgcaggtttagcctgtaaatatattatatctcaaaaacctattggtagcccagttactgaacgtgcagtcccaacaaccattttcttctctgaaaccagtgttaaaactaaatatttaagaagatggttacgtgatccttcattaacaaactttgatccaagaactattattgattggacttattatagagatcgtttagcatctgttgttcaaaagattattactattccagctgcaattcaaggggttaaaaatccggtaccaagagttgctcatcctgattggttacaaagaaaaattgcaataagtaatgataaactgaaacaatcttcattaagtacatttttcaaaacagcacccaaaggatctaaagtgattcttcctcctcaagatattgaagatattggtagtttggctgcaacagatggtaaaaaaatagctaaagttacatcaaagaaaaggaagggccaagagggaattacattagaagaagaagaaaaaggctatcttttatggtaaaatgcctgatccattggtagattatccagcattcttgaaatatcagaaaattaagtggaacattaaagcgaatgaaagggagagaagagaaaagatatttggaagaggtgatatgtcaactagttcatcgtttgcaatgagtaatatcatgaaaaatcaagctgaaaattatttgaattcaatttggcaagttatcgaatataaatatgatccattacatccagataagttaaaagcatttgtcattatatctggtaaactacaaactgttcatattcaaataccaaagaaaatttatttaagcttcaaaaataatagagaatttcctaaagataagattgatttttgtgaagttactaaaagtaaaattactttaccaaatagttcatctgatgataaaaatatttataaattagagatgccatataatgtatatgaagaagaaatgagtaagcctgatagtattttaaatagtactgatgttgaaggaatttatgaagctaatatcaatacttcagaaagaggtattattgagttaggctcatgtatcaaatttgatgaaaacaagggaagccaactgatgaagtcatttgaaaagggtttttcacgtcatgatcttaaaagtttaccatctgatggttatttaagtagatttactatgggtgttctatacttgctccatattgtttccaattcctatgaaatttttacaattttcaacacttcagacaattctgcttttgtttatattcttaaaccatcatcaggtgcacagcaattaccaactaattttgaaagtgtttataatgaaatatacaatgcaaagaaagaaatgattgaaaaatattacagtatcattgattataaaactgatgttgtttttgaaactcaatatttcactgatacttcaaagatgtacaaaaaaattaatgcaaaattaacaagcattactgctaattctgcatctaaggatggttttagttattcaatcacctatggctaaccaattaaaacaagtttttaaaacttcatttgatcttccaactattggaatgggagtttctgaatttcaagttcaagccttaacttggcattcggtcattatcaagagaattgtcaatcattatttatcacttgcaagttggattaaaaaattaatggatttatcaaaatactcaaatgttccattatgtaatttaaatgttgataatattggatatttaattgacattagttattctagaagattaatggaaaataacattatgttatggtggtctaaaaattcaaatcctgattatggtggtgcagaaaaggacagtttcttatctactgttgatgaatcatcacaattcccagttttcaataaacctgaaatgtatgaaactgtttgtttagaaatcagtgttaaaaatttaacaattaatacaattatgtcatcttcattgaatcaatgaagctgaaggtgttttcattacagagaatggtgataatcataattcaacatttgcagataataccttttcaggacctgcattatcagttttaagaggcttaattcaatcatggtgggatgatgcaattaaagatataactgaagcagatgcattaattcagttcattcttaaaatggtgtatgaattcatcatcatttctttatgattcgtcacttcattatcatatccttaatttaacgaaaaaatcaatggttcaattattaaatgaatttagaagaatgggatcaagtgttgtatttgcatgatagaaataaaatcattgttaaaacatcaaaaacaagtattgaaaattcatatgcatatggtcaatatgttatctcaagtattagatcaaaaccattatataatttattggaattaagtgttgtaagatattgggatacacttgtttggatggataaatacaattttgcaggtagttatacatggaatgttacagattcaactactattgaagaacagggggatatggttgatgattccacagagaaaaataaacttgagtatgtttctaaatggcaaattaagaactatttaccaattatattacatgaagaatttgaggattgggttttaatgattttagatgctttgatcaaagatagagagaagagttataataatggagattctaaggaaaatggtacacagaaaagacaaacacaaattacacaaatattaatgcaacaaaagaaagaggaggaagaagttgatattgaaaaaattaacaaggaatggtttatgttcacatttccgtaaaccattactgaaaagaatcaatacattaattaagaaacaatctgatacaatcagagatgctgatatgattaaagaatttgaattccctaaattagcaggttcacatttacatttaacagatccgacgttagaattagtcaaatatatttgtcagatattatcattatcaaagaaaagaaatcttgaagttagattattacgtcgtgatttattaaaactgtttggtattatggaattcagtgaggaaggtatgtttagaaatccatcaacttcattagttattcaagaagttatttgtgattcatgtttacaaattagagatattgatgtatgtaaggaagatgaacaaatgatatggcaatgtccaaattgtgaaaaaccatatagtaagataattatggaagagaaacttatctttgaatttaataaattacttgttcgttattttacacaagatttaaagtgtaataaatgtggtgaaatgaaaagtgatgaattatccaacaattgttcctgttcaggtaaatgggttaataccgttaatatgaaagatattactagaaaatttccacattttcaacaatgtttcagatgcttatcaattaggactactaagacaagttgtcactgatattatttaattcatataacctaaatatatacatagataattagattacggaaaaaaaatagattaaaaactatagaatatgaaatactgtataaatataaaagatgtgtagatgtataatacaaaactaagattaatatctttcctttaatcttgaagcaattgttcttaaattaccgtaaactttaccaggaggactacctaaaatcaaactcataacagcttctctagccattttaatatgagtaaaacctccaagaatatgaatttttgaatctgcaagcacaattctagttctagttgcattttcaattgcaaatctagttctaccatctttaccagcaatacgaccaattgcacgagataaatgatcaccttgtaatgttttaacatctttaatttcaaaagattcaatatataaatcatcaagtcttaagtaaagcaattgcatcatcaatatcaaaacctaatgcaaatgctttaataaaatctgcacctttttgtaaagcacctggatcagttgttttcttacaagatcttaattctactgctctactctttaaattcattctaacttgaagtttcaaatattcaactaatggagggtatattttagaccatgaaccctttaatggtgacattctatgtggtggaattggaattttacgactttcaagtttaactcttttacctgaatcatgcttgagattgaaatttaggtttccccgtttcatctaaaactaaacctgcactaggctgccttattttagattcttcttcattgttattattatttattgtttctatttcattattatcattcatattggtatcaattaaaatttcttcacttggttgttcttgttcattagatactacattggaaatttgtgtatttgcagttggtgcaattctagcagatgttggtgcaaccattattgataattgttctatttctataaagtgatctaactgatctatttgattataataaacctaccctgttgaactgataaagatctgataaaatttattttattttctgaaaaaaaaaatttttataatttcttagtatagtaagagagagtatcttagaaaatagtaaatttttcaaatcagtgcaccataattgggtatttcataatttaggatttgaatacatgaattaatgtctcttttataaaggttagtgttcatctttgagtgcttcaaacggtcaggtaatcatcatgttcccgtctttgaaaagtgtcaggtttgggaataggaaacagatggataaatttcagtaaaaactccattaaaaatcatcaaataagtaataatatctatagaaatggtatattaagatcaataaggtatcaatcaacaaatacgaaattcacagcagataatttatttacatcaagattagaatcattagagaatcatattaataaagaatttctagaaattaataatattaaaactttagataataataaagtaattgatttttataattccattgaaaatttccaacgtgaaatttatgattataatcaattatcaccaaatgataatatatttataataagatctaatgaattattgaataaattattaaatgattccaagacaaattttaatgatgaattattaaggaaacttttcattaaacaaccattatttccaaccttaaaaacaattatcaatgcatattattctaaaaactcttcaaatcatatagattctaatattgcaatgataccattcagaaaacttatttgggatgcacaatttcaacatgcattagattatgttgaattaaccaatggtaataaaagatatattgaatataagaaaaaatcattatttaatattttaaaatattttggtggttcattagttggattaattgcatgtattcatggtagtataagtgttttttttccctgaattaattgaagcaggtacaggtggtacatcatttggtatttactggtatttatgcatgtattataacgtattttgttaattgtggatttttagcaggtttagcatttagttcaaaaggtttagaaaatggtaatctaatgtttaaacaatcaacaatgccacatgattggtatttaaaaggttgatcaattaaagatgtgttctaaaattgttgaagcagattcagaaattaatggtattgatggatttgcaacaagagatgttgttaaaagagttcaacaaatgggatttgaagttaatgaacctgaacaagaagttatgttaagacaatattggtattcatcaggtgaaggatttatgtgggttgaacctgatattgatccagccgaaattgaatggtggaaacatttagataatattggtgttaaaaaagtttgggatcaagatttgaataaaattgaacaagctgatgcaactgaagaaattaatgaaaatgaaaatgaaagtgaaagtgatgataatgataatgatgcagaattattattaccatcagataagaaagattaaattagaattattaatttataaaatctgtatatataatataaaataatgttactgtataataataattataattttaaatatagtgcttgaatatttagaaaaaaatgatgattttttggaataataatagaagagagaataaaaaatgttttccaatgtgccaattgaaaagaagaaatagataagaccaataaaataattgaagaaaaatgaatttgaacataaatatatgaataggaaccaaatgatttataaactaatataatatataatataacaaatgaataataagattaacattgtactattacattgttaaatttgaaggtaaatgaccattacctaatttatcatgtaatttatttcccttagttttattgaaagatttaccacttaaccaaaattcaagtacataattaaagaaaaaatcatcttcattattaaaagcatctaaaacttgttcaattttattctttaattcaacatcatttctagctaatccttgtaataaggataaatatttatcgactggtgcatttgtttgattattcgttacacttgaaaatgcactaaaaccaggtatagattttgctataaatggatttgatgatgatatagatgatggagatatgctattaccattaatagttacattaatcgttgaagttgttgaattgttttttgtaattgatgatgatgatgatgataatgatgatggtggtggtgaacgccttggatttgaaccagttcttgaaattggagataatttagtacttaaattagttatatcattaatagttggagtacttgccaatggaaacattaaaccattagaatattgatttgataccagactatttaaattattaaaatgataaagattattcattttataatttataacattattatttgatgagaattcaagattatttgaattaagattaaaaaatcctttcctttgacttaaaagataaagttcatctaatttatcgaaaattttagaacctttatcaaatttatctaatctagctaataaattagttaattttgtatcatttggagaagaaattgttgttgctgatcttgtagataagcggagtggagatttgcaattcttagaggtttttaaacgaagaggtgaaagggagtttttgagcatagctgtagatatggagtgtgataccttgaagagagagaaagagaaagagaagaagaggaagtagaagaaacaagagaaacaaaagaaacaaaagaagcaaagagaaagaaatggttcaacacaatcaatcaatcaatcaatcaatcaatcaatcaatcaattcatcaactgtaagttatcggtcttagtcattaaatacaggtataataagcttctagtctttaaattaataacgccctcaaaatttatttgtggcgcatgccgtacatgtggagtggcgcagtgtgaatgattctcggaccattattaaccagattggaatcatcgatcttcatcgagattggatcatcctggaattttgatctggagggtatcagtatgttcttcctttgtcaatggtttatttagtattgctgcgtcatggggaatcctcctttaataaaggatcaagattttgtggttggattgatgctccacttagtgaaaatggtgaaaaacaagcaattgaaactgctaatcgtataatggaagatcctttaacaaatcatattccaattcatttattagttacatcaagattaaagagagctattttaactgctaatataatattagaacaaatggatagaattaatatggatgtaattaaaacttggagattaaatgaaagacattatggttgtttacaaggtaaaattaaaaaagatgtattaaatgaatatggtaaagaaaaatatatgttttatagaagagcttatgatggttgtccattaccaattgatattaatgatgaatataataaagatactttaaaaattgcaaaatttgataatgaattaattgattatcctgaattaataccaaaatgtgaaagtttaaaaatggtaattgaaagattaaaacctttttgggataaggttattataaatacattaaagaaaagggagaatgttttatgtgttactcatggttcagttgttagagctttattaactatattatatgaattaactgataatcaagttgaaaatttaaatatacccaatggtatgccaatattaattgaattagatgataaaacgcttaaaccatctagtagtacatggacttatttagatcctgaacgtgctaaaatcgaagcagaaaaagttaaacatgatggtattcattaattaattaattaatttatatggtttctataaaagtttttaaaaaattattattctctatataaagttttctctatttaacaagacgaccagcgtttgttttcccaatttttaacagtgtattgaatgttattttgtaagacacccttaggtttaaaacatcttttattaaatgttgtacaatcattcaaattacaccatggcattattttaccattttccctaactaatgaaccatcttaataaattcatctttaactttgatatacattgatgatgtattttgttcaattgtgaatgaatcattacgtggttttaaaataacttttgaccacattttatccctcgataaaagtgaatatttgaccattgttttaagatttccattattttcattagtgtttgaaatattatattcattatttttattgaaatatttattaataaattcatcaattgttgaacaatttgatgatgtgaattgattttgataataatcaattaaattttcacataataattgatcaggataattaattttaattgatgaatcaattgaataaaatctcaaaaatattggattaattctacattctctttgtctgggtatataattatttgaatcgagatatgaattattattattatcacttacttgtttataagttgtttggaatgtctctaatgcaacttcatcatgaaaaattaagtttttagtttgagcttcaattattttttcaaccgtaacagtagtagtgatatttgatgtagtattatatttgtaaaaagattttgcagatttgattaatgatgaatcttttattttactctttaatgaatggaaaagagattttgaagatgtgcctccagatgataaattcctcaacttcatgaattatttcattatcatcatcatatagagattcaccaagaggatgattttcaacattaaattcacaatttaatgaagaatgggtattatttgctttttctaattgaattaattgataatgaatcaggatgtaagtgaaggaattgaataacatgaaggtagatgatatatcattattataatctaattgaaattgttcattaacagtgggtattgataatgaacttaatgaaaaatttggtgatgaagttaattgtggtggtgaagaatctaaaggtaatgaagttgatgaaagtttagatttattatttttataaagagttgatttctttttagttaatacattttttaaaattggtgaataattacttgaaatatttgaagaattacatgaagaaatatcatgattatcattggataaagtacaattatttgaagaaactgaataaactgaaatatttgaaacttcagtaactgaaataactgtatttgtagttgaaagtaacgataaatgtaatgatcccaacatgattatcagacttatacaacagttaagtcgattggtaaaacaaagaagtgattaggtaatttgtaaaaataaagtaattgggagtgttataattggggattatataggattatacttactaatgttactccaacggtttaaatcattttccagataacgccaattgtgtcaaattttttacagtgaccaattcaccaccttaaattgtcgcaaaacttacctaattgggtatttttaccacactattacacggaagttccgagttttcctatggcaatattaattttagttttgttttttctaattttatactcttttgatgccttgtaacttcaagggtgggtatattaattactttaatataccactcaataattaagagaaggcttaatgtttatattattagtactactacaatttagccttagatgtagagttaatacttagtaaataaaacaactgtggttaaataattaacttgctacggaatgctccggaattaaaccgatcttatgttgctatcagtagtttgacacattttgagctattttttcttagtttactgtgagaacaatttgagaaaaagccactgattttgttttttttttctttgcttaaaaattattactattctgggggaagttctccgttaactgtgaggaaaaaacttctatattcgcttatagtagctgttttcggaacctgccattttaggaagttccattctgttagtgccctcttaataaaaaagccttggggcactggattaagtgttaactgaagctttataaggaaactaaaaatattacccctaaggggaaaataatttatcctataagtataatatgttgaattacgtaagattttatgattataattatattagctaagcgtagagtgtatattccattctaatctatttataacttgtttgagaccatcattgaaattaataagaaactaatatcatcattagaaagagaaaagtttgaattacaacatcctgagaaggaatttttcgagttcaatctagttattgaatattaatgtaaaaatattttttttccatagtaaatttactaaaaaattgtttgaaaaaacacgagaaaggatcataattaacacaaatttaaagcataccaagtattttttctagatatagtgactttgtcagttgttacatctaatcgtatgatatttaaattggctatttaatgtcggtttgggtgtgttgtaatgcctattcaatcgataaatgattatactattaggaaattttacatgcattattataccgagcatcccacgaaaaacacccccaaatgttctaaaaaccaatttgcttatttattacgtaatacaattaatatgttctaaacgccgctattaaaaaacttgcgtcgatgagtcttgaaaaattttatcggaaactagaatcagcatacatgcacatgttgtaatttaatgatcaagacacgttgaagaaaaaagtatataatccatcattaactaattgtttataattacttaagataaactcttactaacaattagtatagattttcatagttttacaaatacttagatagttttatcttttaaaaaaaattgattaaaacattcaaacctatataacccaagcattgtcaaatcggatgatgaggatgatgaggatgataagaatattcctgatttaacagttattcttttctgctgttgtaaatctgctttaaacaggctagaatttagcatcataaaacgtttattaatttttaaaatcttaacataagttgatttaggaatttaatggactgacagataaaagagtgatgggctgtggacggcgatacttgagcggaaaacagggatataactaatagctaggtagcttgtcatttcagatatcgtgtttgtcaccaaatgacccatcaatttctgaaaccagtaaaaattcggacataacacacatttcccggtacaggaccatcccaggatttaaaaattgcttgcagctataagagctctaaagaattattactacttatagtaataaaacattaaccgcaataaatccaaaacccaccgaattattaccgaaaaaagccgcatactgcctaatacagtaattgcggtacagtcacctatggtttcataaattgataaagtttaactaacattatatacccagcccagtaaaaaccaatatagtcggagtgcgcattaactgggggaatgatgggaaatccccatcaagataaaaaagcttttcccccttgccccctttccgttccctctaccaaataaagcgaaaaatttttaaattaaattagagataaagtaaaataaaaaaaaaaaacagactaggcactagtgcaatcaagcgatggaatgaaccgtttcttttttcttgtggctgttgaccgtttttttctgagaagaggcgcccttttttgtacctgctatttccactatctcccacttttcacatttttcttcccttgccacatatactcttctttcttacctttgatctttaaactacatccttttctgctactgctttgttttcatttaataactcatcgtatttatcttatcatatagattaatattcacaacaaaaatctacaacaaaatctacaactaaaaccttttgtttctttcatcttgttcactaaaattaatctgctgtttttttgaaattactagataatgaaaactttggctgtcatgactgacggtgctcctgttgatattataaataataataacattaataataataatatcgatatcaatatcaatataatatacccatttctaacaaaaataatgatttaaatagtgaatataaatactactaatgaataccactgttagtaacacaccaaaacttttagatatactaaatgataacgttgatcctgattctactcattcaaaaattaattttcttgaatttttagttaaaaaacattgtattgaaaattatgaatttttttctgaattatcatcaataatttcaaattatgatacttttaaaaaatataattcaactgctgaatggttctctctttattataattttattgaatctgaaattattaatttacctgcaaatttaatttcaaatttatcaaagaaggaattacctgaattatcttacttaaaaaatattgaaaaaattatattgaattatttattagcaacatattatgaatttttaacttatacaaaatctaatactaattctaattctaattctgctataaattctaatacaaattctaatgttaattcaagatcaacatcattttcgaattctgtatctacatcattcccaacctcaacaaatgaacaaataactatgcttacaattaataaattaaattatgatatacgacataagttattactcaataataataataataataataatcaagcttggtatagattcagatgatgataatgatgatgattattatgacgatgatcataaactgataaaatcatatcatgaagaagaagataaagaagatatacaattatatatgatgatgatgatgatgatgatgatgaaaatgggatacagataggaaaaggtaaggacattaataaaatacttttagaaaccactagtagatcaatgtcagcatcattatccaattccatacttaaatcaagatctccatcaccaataagtcttaataataataataattttgttggtaaattagctaacagtagtaatagtaataataataataataataataataataatacagttattacagattcaaatagtataacatccaattcatcatcatcaaattctacagtttgtgaatcatgtgattgtgataaagaattaaagaaatggagtaaattcaccaagaaattaaaatggagacgtaaatccagcacaagtacgagtacgagtacgaattagatatattagatattaatttatagaataatttatatagagaaaaacactaagaaaataaaataaaaaatagaaaataaaatatcaaaatcgaatgacttttcttaaactgtggggcactaagctttgaatttaacagtgagggacccttataagattatttttatcagattacgtaatgcctctcaatcttattccacttgatccttcactatacacagccccccatttccctcttattattatattgcaaaatatgaggggggtagatgaatgtatttggaaatagagatggatatctcttattagattagcttttagataagtgatagatagatattatcagtgacattacgataattagttaactcttatttaaacttaattattccctacctataatgcacttcactaaataatttatcttcttttttttttcacactctgaagtttcactctcattttacatatttgcaaaatcaaacacacaaataacgaacataaattacaaatgtcactcaaattaacttattattgtccatttgatgaaactacaaaaataattagagttccaagggaaacggataatttatatctacaattacatgattcaaatgataaattaataaatccttctaaaatttttaaatttgcaaaatgtaaaacaagtgaaccatccgttcatcgttcaattcatcaatataatgattttaattgtttttataaggcaaaagatatttgggaatttgataatattggagtttcaaaaccacctccaaatattaaaaatgctgaatttatcaaagttaaatcaattgaaaatggtgaagttcgtaattatgcaattgttagatatttagtttgtggtcattgtgataaaggtgctttcggttttggtggttatttattggattctgaacaaagggaaaatcatgttgaaataggtttcgatttatcaactgttaacccaaatgatttaacttatttcttctattattaatgcttaatgttattttcactttactttactttacttaattttttattttacttttctctataataattttaatgaataataattttttttaataataatatggtaatgataataataaattataaaaagaattataataaataaataataattataataataaatatagaatgaaataaaagatttaaaattcaaattaattcatattaatttaatttgcttgtaattgtttcattctgtttaatgcagaacctgccttgaaccattcaatttgttcttcattaaaagtatgagttaaagtacattcccatggtttaccttcctttggattaacaaccatagtaatatccttacctggagcaaagttctctaaaccgacaatatcaatttcatcatctgggttaatcttatcataatctgcattatccttaaagtttaatgctaataaaccttgtttctttaagttagtttcatgaattcttgcaaatgatttagtaataattgcaaatgcacctaaatatcttggttctaaagcagcatgttctcttgatgaaccttcaccaaaattttcatcaccaatgacaacccatttgtgaccattatctctataccatgcagcagtatctggaacaccaccccaagcaccattatagtgattttgaacagtatttgccttaccattaacaatattaatagcaccaatcatatagttgttagaaatattttgtaaatgacctctgtattttaaccatggaccagccattgaaatatgatcagtggtggttttacctaaagctttaattaaaattggcattttaagtgcatctttaccatcccatggtttaaatggagttaatttttgtaatctatcagaagttggagcaatttgaacttgaactgatgatctatcagctggtggtgcttgataagtattttcacctgcatcataaccctttgctggtaaaccttcaccatgtggtggttttaataagaattcatttccattagcatcctttaatttatcagttaatgggttaaatcttaaatcacctgcaattgcatatgcaacaaccatttctggtgatgcaacgaaagcgtgagttgctggattaccatcatttcttgcagtgaaatttctgttgaatgatgaaacaatagtattcttatcacccttcttgatatcttttctatcccattgaccaatacatggaccacaagcatttgctaaaactgaaccaccgaaatcttggaaagtttttaagaaaccatctcttgcaatagttgctctaacttgttcagaacctggagtaacagtaaataatgcctttgctgctaaaccatgagcctttgcatcttcaataatagatgcagctcttgacatatcttcataagatgagttagtacatgaaccaattaaaccaaccttaacttctaatggccaatcctttgcaacagcaacttccttcatcttagaaactggagtagcaagatctggagtgaatggaccattaatatgtggttctaaagtgtttaagtcaatttcaataacttgatcatatggagcaccttcatcagcagataagtaatctttcttgtataatttagcaaattctgcaatttcagatctttcagttgcttctaaatatttaaccatagattcattgaatgggaaaacggaagtagttgcaccaatttcagcacccatattacagatagtagccataccagtacatgagaaagtatcaacaccatcaccgaaatattcaacaatagcaccagtaccacccttaacggtagtaataccagctaacttaaggataatatcctttggagaagtccaaccagacatcttaccagttaatttaacaccaataatctttggagcctttaattcccatgggaaaccagctaagacatcgacagcatcagcaccaccaacaccaatagctaattgacctaaaccaccagcatttggagtatgggaatcagtaccaataagtaaagcacctggaaagcatagttttctaaaacaatttgatgaataataccagatcctggtttccagaaaccaatgttatatttagcacaagctgaacctaagaaatcataaacttctttatttaaagagattgctcttgctaaatcttctggaccttccttttgagcttgaattaaatgatcacaatggacagttgcaggagttgcaacagatggcataccagcagacatgaattgtaaaatagccatttgagcggttgcatcttgacaagcaactctatctggtcttaattttaaatatgagacacctctttcaatttcttgactttctggtttatctaaatgtgaatataaaattttttcagcataagttaaaggtctatttaatcttgccttaacaatttctaaattcttaacattttgtttataattaatgaaggtatgatcttcatgaatgttcatatgaactttagaatctttggttaaaccagttgcggtagctaaaccacgagttcttgggactctagcaattgatcttgcggataacattgtagatagaggttacttaagggaaacaaaatcaagaaagaataaacgaaatggaaagtgaaaaagaagagaaactattactttattattgaaatcatcaatttaattaaaaattggaagaatgcttttaatttaacaacacaattaccaaaaaaaaatacaatattgaacatttccggaagggcgagcgaagacggacttcggatccgtacacttttcatactttttcatccaaccagaatttaaggatttgtaagtatctattatagtatttggtgtatgttggtgtttgtttgaatgttttatgagtttttttaactggttttctataccatcctaacactactactacatagttagcctactttgaatgattataacaccctctagtgctactgttatcttataaataagggctcaaaatacacataaccgagatcggaatatgtgaaattgtatgacgcgtgacgtttttcaaaccatttttttattgtgtcagcaattttcacattgcgttgattcgttattttatgagacatttcctaagctaccgatattcggctttgcaccgccaccgagggattttgttattttccaagtttttttatcgcaccccatagtggctggtgaaataaacctttctttttctatatttgtggcgcagtatattttaatcacattggctcctatttgcggctggtgagaatcaaccctttcacaactaagtaaacttcccgaaaattccggtaacgacattcactaaaggcagtagtagcctccccctagtaaaatgattttagcttagtatatcagtaatggtataataatttcaatcaactaaggctgggttactttagcctttactaccatcattacagccatctattcaattcaattccagtggtaatttctttatataaattccacaacgtacgatattagcttgttgtactcattaatgtcattattaccatcattatatgacatgttcattacattgataataccgtaatacatgatggtggctcgtcaaattaggttatctccccataattttaagaaaaatctgagctttttttatcaatttctcattttcttattttctcgaattttccttctagtaccttctagaaatctatttatcatacccttttcactttaaaatgttaatgagctgtcctattttctgttatcacttcactttcttgaactattataaataagtcaattgttatcctttaattttagttgtttgtatcccaactttagttacctttgaattttttacaattttcatttatttattactttaaacaaacaaaaaagtaaagactatattattataaaaactattatatcaaaatatggattcaactaaatttacagatagagcattagaaataataactaatgcacaaaaattatgtcaacaaaatcaaaatgttcaattagttcctttacatatcttagctgcaatgatacctgataatgaaagtcaaccaatatatttaaaggttatcattgaaggttcaagatatgaatgggaacctgttaaaaggttaattaattcaaaattattaaaattaccttcaacttctggttcaaatatggaacctggtatgtcatcttctgctgcaagtattttaacaaatgctgataaaattaaacaaattcaaaaagattcttatattggtcaagatcatatattatctgctttattagatgattcatcaattcaagcattatttaaagaattaaatattaaagttcaatcattaaaagatcaaatcttaaatttaagaggtaatcaaagaattgattcaagacaagctgattcatctgaagaatttgaatttttatcaaaatatgcaattgatttaactgaacaagctttacaaggtaaaattgatccagttattggtagagaagaagaaattagaagaactatcagagttttagctagaagagctaaatcaaatccttgtttaattggtgatcccggtgttggtaaaacttcaattattgaaggtgttgctcaaagaattgttgataatgatataccatcagttttacaaggttgtaaattatttgcattagatttaggtgcattaaaggcaggtgcaaaatatcaaggtgaatttgaagaaagaattaaaggtgttttaaatgatattgaaaaatctaaaattatgattatattatttattgatgaaattcatatgttaatgggtgatggtaaatcagatgctgctaatttattaaaacctgcattagcaagaggtcatttccattgtattggtgcaacaactattaatgaatatagaaaatatattgaaaaagatggtgcatttgagagaagatttcaaagaattgatgttaaggaaccaactgttaatgaaactgttgcaattttaagaggtttacaaccaagatatgaaattcatcatggtgttagaattttagattctgctttagttgcagctgctcaattagcttcaagatatttaacttatagaaaaatgcctgattctgctgttgatttgattgatgaaactgctgctggtgttgcagttgcaagagattcaaaacctgaagaattagataaaaaggaaagacaattggaattattagaagttgaaattaatgcattagaaagagataaggatgcagatgaatcaacaaaggatagattaaagcaagctcataaaaagaaacaagaattagaagaacaattacaacctttaagagaacaatttaatcaagagaaatcaagtcatgaagaattaactgctgcaaagagaaaattagatgaattagaaattaaagctcaagatgctgaaagaagacatgatactgctacagttgctgatattagaatgtttgcaatacctgatattagagcaaaaattgatgaattagaagaaaaagttgaaatggaagaaaattctcaagaatatttagttaaaaatgttgttggtcctgatcaagttgctgaaactgctgcaagattaactggtataccagtctctaaattaactcaagctgaaaattctaagttaattaatatggaaaaagaattatcaaatgctgttgttggtcaaggtgaagcagttaaagcagttgcaaatgcaattagaatttcaagatcaggtttagcaaatccaaatcaaccatcatcattcttattccttggtttatcaggttcaggtaaaacagaattagctaagaaattagcaggattcttatttgcagatgaaaaggcgatgattagaattgattgttcagaattaatggaaaaacattcagtttcaaaattaattggtactactgctggttatattggatttgaggaaggtggtatgttaacaaatcaattattgagaaaaccttattcagttatattatttgatgaagttgaaaaagcagcacctgaagttttaaatattttattacaattattagatgatggtagaattactgcatcaaatggtacattagttaattgttcaaatgcaattattattatgacatctaatttaggtgctaattatattaatgaatcaaatgttactaaaattacaccagaagttaaaaatcaagttatgtcagttgtttcaaaacatttccgtcctgaatttttaaatagaatttcagcaactgttgttttcaatagattatcaagaggtgcaattgctaagattattaagattagattagctgaaattgaaaagagatttaaagaaaatggtaaagacttaacattaaaactagatgattcagcattacattatgtttgtaaacatggttattcaatggatttaggtgcaagaccattaaatagattaattcaaaatggtatattaaatccattagctgttatgttattgaatggacaaattcaagataaggaaactgttaatgttactgttgatggtagaggtttacgtgttattccaaatcatgaagcaatcgataattcaatggatgttgatgcagttgaagattggactgatgatgcagataatgatctttatgatgatgatgttgaattagattgattctaattagctttcacttcttatttaaatttgtatatattcgttaaactttttttatatttcttttatattttacaatttaatgaaattttttaattataatttaagttttcttttaatattggtagaagagtatacagacttttacccatgacatataagttgttgtgttttttaaaatatttctattttctaacctgcttagtaagtatttgttgcatgttttattactctataacatcaacagtggtgttataacgttgttaacaagtataataagttatttggtaactgaaaatctaatgttatttcttttacttttgaatatttttacagaacttgtgctattcaatcatcaaatctcaaaaaatgaatttttgtacatgacaacctaatttgatatcataaatcatttaagcatacctgtacaatttgatacgtccaagtttcaatcaaaacgacaaagtattgatgaagttatacttaattgaaattgtagttgagccgagcccccaacattttatataaaattgatttacaaaatgtttacgcatatagtaaaaaagttgtttctacatattcaaacataattaatattcataaatacaggtataaatctactcatttatctatattgttttcatattaactattcaatatagtacatgtaacaactactagtaacttcacttcccagctcccaagttgataactagaacccatcataattttgattagctcgttccgcgatttctcttgtgaaaaataattttggcatgttaacttctaataataatattgtatgatggattgatacaaatcttaacatacttccatgtgaaataaattaattaatttattttcttttatattactttaatataatagtcttattaacagacgagtaactaagtttttaattaaatacagttagtttggttatcaattgaaaaaagaaattgtttatagattgagggaaaaatgcagtactttggtagggcaattggatcagtttctaaaacatggaattcaattaatccagcaacattatctggtgcaattgatgttattgtagttgaagatgagaatggtgaaatgagatgttcaccctttcatgttagatttggtaaatttcaattattgagaccatcccagaaaaaagttaatgttatagtcaatggagagataacggatataccaatgaaattaaatgatgaaggtgaagcattttttgtctttgaaacagatggttatgttcctgaatatttaagaacatcacctgttgttagtgctaaaagttcaccatcaaattcacctagactcacatcaaattttaatagtaatgatgatttagaatacttggatattggtgaaggagctaatgattcaactattttgacatcacctaaaaaagatttaattgaaagaatggaagatgggaataataatgacaataatgataatgataataatgataatgaaaacaatgataatgataaaaagagtaatgaaagcattgataatcctgggagcgaaccactatctagagcaggcagtatgtcaccagttgaaagagctagaagtattacaatgaaactgaacataccatcaaaagttgaagcaaatggtgatattttattagatatgcatggatataagagctgataaaaaggatatacgtgaaactgatattttagttaaacagttattacaagaagaatttggagatgatgttgatattgattcaattatgaatacagatttagagggtaatattcgtattttaaatacagagggattaacaccagaatcatcattaccatcctcacgtttagattcatcatcatcatcattaccatctacagtttcaaataaagatagtaatatagctgaaagtaacataccatctcctgaacctttaaacatcgatgaatctaatgataatatcaatgcaaacaaaagttttgatagtgaaggtaatgagaaaaatcatgatgttcatttcaaaacattaagattatcatctgaacaattaaaatatttatcattgaaatatggtgaaaatgatataaaatatagtgttaataatggtaaatcagttgttgtatgtaaactgtttttatggaaacgtagtacaccaattgttatatctgatattgatggtacaattacaagatccgatgcgttaggtcatgttttaacaatgttaggtagagattggacacatgaaggagttgctaaattatttgatgacattgaatttaatggatataatataatgtatttaactgctagatctgttggattagcggatacaacaagatcatatttacaaggtgttgagcaagatggatataaattacccaaggggccagtgatattatcacctgatagaacaattgcctgcattaaagagagaaattgttttgaaaaaacctgaagttttcaaaatggcatgtttaaatgatatcagaacactttattatgcggataaagtaaatccattagaacatgatcaacatcatatattatatggatatgaaacaggtggaagtgaagaatccatagtaaatgatggtaataatgatgaaaatagaggtgatagaggtgataatgatgaagatgttaatatagaagaaggtataaatgatggagatgaagaatatgatgatagtaatttaagtgaatttactgatataaatacgagtactgatccatctaaacaagggaatgaacttttaaatcaattagagggtatgaaattagattctgttgttgatgaaagtaatacaccattttatgcagggtttggtaatagaataactgatgcaattagttataggagtgttggagttccatcatcaagaattttcacaattaatccagatggtgatgttaagatggaattattagaaatggcaggatataaaagtaattatgtttcaattgttgaattagttgatcaattttttccaccagttgaaattaaaattggtaaagagaatgaattaagaaatgatatatcaacaagtaatggtaatagtataagtggacaaatgtcaatgaataatgcacgtaataaatataccgaattcaattactggagaaatccagatattgacttatcattaattagtgatgaagaaagtgattcagctgaaggtgttacagctagtgatttaagtacaagtaatcaaataaggattgaaattaatgatatgaataataatgatatgaataaaaataaaactgatagtatgaataggagtattaatttacaaagaggagagtccatagaaaaggagagtttacctaagagaagttcagttacatccagggaaagtagtgaagctaaagataacaaaggtgtgaatggaataaaagatgaacttaaaagtattggaagtagactaagttatttccttagatcaccattatcatcaccacagaaggaggatatactgagaggaacaatcgatagagatgataataatgatagagtttcactacattccgattcagattctcgaattgatatggatagaggtgatgaggagagtgactctgattatatttacgaaaccagtggtgaagaagatgaagatgaggaggaggtagattccgaagatggaaatgatgatatggagaaagaattgaaagatttgaataataacgatattaatactgaaacatacagtgatgtcaattccaaaactacaggtaatggtaatgttgtaccgccaactccgccaatacgtagacaatcggaagcggcaattaatgaaagtccagtacttgggaagtttgtataaaaaaaatggcacaaatgtaactacaacattaatataacctaagatatagtacatcatagttcccaaggaaggacaagaaagcaatttggtgtattatgcaaagtgcattagctaatgtccctttactggtaactaaatactactaaatatactctattatagtattttgtgtaaatatagtataaattactaaaaatagcaactttaaagtttaaaaagtttatgtgacgtaatagtttttccattttccaattttagtatttttagtatttttagtattttttcatttcttcaactcagtggaagaactctgtctcttattagagagagtagatattgagttgatgacagagtgtataatgtttactggtaaggtagtaagtatatactttgaatgtagaaactcaaagagtgtagtgagtctgtatcttgtagcaaacaagcacacttggcagtatcaatatcagcatttcatttgttgtatcggtggaatttgagaccaaacactattttatagttattctattttttacatcccccttttctaaaactcccttcactggaaccttcgtatttgattcactatatcatttttctattaatacactacaacctttgatttttgttttcgatattgttttatctcaggttcctagtagaagttttttatcaatttgtattgtttcatatattgattgatcataaatcatactatatcatcttctacatcttttatcttaatactttatttattcaatacaatcaagtatttctaactaaggtgtttatgcttacttatgggatccgaatttgatcaggttgaagacatttgtttccataatcattccgataacgccaccgattattatcataagatgatatctcaaaatatagatattccgaaatcaaaggatagttcatcaatcaatagtaattctcaaaatactgattctattactaatactattactaatattaatactaatactaactctaatactaatacaaattttaatatgaacaataatacaggccattcaaatacaaagacacataaacggggtgcagcaaattctctatttaattctgattcaacacttgtcgataatttctctaataaggtaacaagaacaatttctgaaaactccgaactttcatcttcttcatcttcaattcattcttcttcaactgctatatctcataatattcagcagttatcctcaaatacttctccaatatttacgacatcttcaaattcaaatacagtaccccagtctcctgctctttctacaataatgattcaagaagagagtgaagaagatgaaaaagataaatttgcaaatgattctttatcgaaaaatcttgataatacaaacctcaatgcaatgataactaataatagcaatagcaatcacaataacaatagcaatagcaataataatcataatacatttaacttttttgagactacatcaacactgtctcatcatcatattaaaaatccgttgaatacaaatagaggtttgttaaatcgttcaaaatttcatggtttgggccatagaactacaaaaagtgaaaatttcaatacaaacttaaagaaaaatttattttccatgaaaaatataggaaataattatcttcctcgtagagatactaatcaacataatgtcacaactgaaaatcatgaacataatgattcacgtaacactagttttgaaattaataacaacactaagagtcgaaatactctaaatctttcactgaatcttacacctaacaaaagttactttgatccaccaccttctgctcctgctgattcccaaaataaattcacatttttagagaataatgataataaaaatacagaaaacaatacatctgaggatcctaatcttagcaaccatccaaatattttcataaattcaacaccaatgtcctctgaatttaatttctctaatatttcaaatactacaagtagtcccatgtcttcatcttttaaattaattagcccaattgattcaacttttaaattaaacaattcaagtaataattcattaccaactagatcaagtgcaaaattcaaaagtaataaaataaagataccagaaaatgttacattattaaagctaaaagattctcaaagttttattcaagatttcatgaaatcaattggttcagataaacttccaaatttactgataatcgatgtacgtcctttccatgattattgtaaaagtcatatatccaactccatcaatatttgtttaccatcaactttattgaaaagatcaacttttactttagataaatgtatccatacattaacatcaaaagagaaaaaattgttcaccaattattatgaacgtgatagtaaagatttaccatcagttttattttatgacgattctgtatcaacagaggatagtatctcatcatcaatttattatttagtagataaatttttaagaagttcaaattggaattcatcattatacattttagaaggaggttttagaaaatttgatcaactttacaataaagaaaataacgataaaaatctcaaagaaagtgataataatgaaaaatcttcatctaccttaagctcattgatacataatcattcaacaacatctgttaactcatgtcttttttcacctatttcaaacctcatttctccacattcggtaacgtcacctgaaaattttaatagaaacaataataacaatgaattaaacccatcatcaataacggaattaaatacaaaatcatctaataataatcatgcaagtaaatctccaattggcttatcaagatttttattacctgatacatcaaatatacccatttttaaaaccaaaaattatgatgaagttttatcggacgttgtcgatacttctattcatttagctaatgaattatcaccatctcaaatctccttattacctaattggttaagtcaaaacataggtcaagatcttggatcttcagaattaactaagaaatttaataaacttcaattacaagaacgtgagagattatcgaatactttacatggtcataaaaacaatccagtttcaacaaaagatcatcctattatatctgctggtgttgaattaggtaggaaaaatagatataaagatattttcctttatgaacattcaagagttaaacttgaaaatgatttaacaccttcaaatgaaaattttaattattcaacttatattaatgcatcttatattaattatactagatcaaatttaaattatattgcaactcaaggtccattagatgaaacaattggagatttttggaaaattgtatatgataacaatgtaccaattattttttcattaacaccacaatctgagaataatattgaaaaatgtgctccattttggaatccaggtgtttttcaatcaaataatgttagaattgaaactgaattaattgatcgagttgatgatttaaaattatgtggtatcacaagtgcaaaatgtattgcccgtgtatttacaattaaagttgataattcagacattgttaaaaaagttttacaagttcatatgatgagttggccagattttggtattgtcatttgtgaggaagatattttaagtttggttagtttgaaaagatatatttatgataaactaaatataacagatgctccaacattagtccactgtagcgcaggttgtggtagaactggtagtttttgcgcaattgatacatgtattgatgttttattaaaggatgaagttgaacatgtaattgaaaagaatgatttaattttcgaaattacatcaaattttagatctcaaagagtttttatggttcaaactttaagacaatatattttaatttatgatagtattattaaatatttacaaatgcatcataatgctgatgttaatcataaagaagtaagggataaaaatggtgatctattaacaaataaagggttaattaattgggaagttagagatcctgggattttagggaaatttatagaatcatatatttaggatatatatgataatcaaatctatacaaaatcaagtaaattaaattaaaagttcaaaactatatgtaatttataaaccaataacatacgttttataatatagtactaaaataacaaggtatattttctctttcaaaattaatttttttccactattaaccaagtactagttcatacaatataacaattatatttacaataattaatggaatccttagtaacgtacgtgttgcactaattaaattgattattcttgatttaatactttcaccattacttgtattaccaccattttgcataccaaaatccccatatccaaattgacctgcactgtttaaattattatttgttgaatcagtcccagctgtccatcctatacgtgagagaaatctatcttcacttaatattgcaattccattaatgaaaaataatatagctatttaaacaaaaaaaaacatgttagtaatctgggatgaattttcgtttatatttaatgtatcacataccataaaagagcgttccaattccaaacatcactaccttttccagtaaatcaaagaaagagttgagtttaaataggtaaggtactttaacatcaacagcttaaacattgtaatggttggctaatcattcttaaatcgcgtctgggaaagaccaatttttttgtctctctggtctatgactactatataactagcgcaaaactataggtcacgtgatgcataccctttgcaaaaactgtgattactcaggaaacagagtccaaaacctcagttgagagactggaatagcagacattagtaacaggatatagaaaactattaaaaaaatataaaagaaaacttcaattgtttaggaaaatttaccgccaatcatacccttaattgcatcattctttgcatcagaaatcattttatcaatatcatcgtttaaatcacctaaatatgaatctacattattttgtgcaatttccagttgattagatggcataatcagtaacaccacccagccatcctgtaacaggtttagtgttaacttttttcttgaaatgtcttgttggagtttccattaattgagcattttgatgaattgcattaggattaaaataaattggtttagctgtacttatatacgtgtaattagctggattataacatgaaacttcccatgataatgtagattcctctgaatttgtctcatttggtctaggacgtccaattaataaattataaagttgtgggtatgtaacacttggtgtatttttaagcattggatttgctcccggtctccatggtactgtgatgtttttaaggaataatgtatcagttgatttacttgtttccaatgacataacaggtgttctaatcttcattatattaacaagagcagcttcagtttctgtgattcttatgaaaacatcaccaagaggtaaaatggaactttctgatgcatattttgattcaattctgtatggaattctaagatttgacatctcagctaatgatggaatagttaatgtcaaaatctcctttgaaattccaagaataacaattaaacaaaatgcaacttgtccagttgttggagattttgcaccagttataccaactttggaaacattacccttattgaaagttttatgtgcaatcttagaattgtttttgagaactctaatatcggatttagactgatgaaataacataaggatacactctgtctgctgtaatatctctctttaaatgttctaaagttggaattgcaggtctaccagtttcggaattcacaactgtaattgaaacaatatcttcatcattgcaatcaatttgctcaataaatttaactctaaaactaccttgtaaaccacttatctcatacgtaagaattctaccaatatttgtacccacatacattaatataacccctctttgattactttgtgaatgaacaccataaccaaactcaacacaggtaggctttacaggaaggttcaatcccttatccttcaaaatttcattatgtatgacagtaccagaacgacgatcaattaataataatctacctgattcataaccaattaaaacaaatcccagattacttgaacttattgcagagactttaccattatttaaggattttaccaacagttttggtaaaaatccctttttgatattgcttggagttcgatcttggatattgattagcgctttaccactattttctaatgataaacttgacattttaccaactaagttctcattattttttggatcataagccttatttatttgatatgaaaataaaagaacatctccactatacaaactgcaggcaatttctaaagtttcaggtgcaaatgatatactttgaacactaacactttcatcatcttttaataacaactcagaaatatcaatttcaaaaattttactactatccaatcctccctccgaggaatcccataatctaataaacccattctcatgaccagttataattaaagatccagcatccgctttatatttaggacgacaaggtataccaccttttaaaatagaatctggtagttcatcagcatttttaactgtattcatactattcaatatacgacggtcaagatatgatgatgatgaacatgtaattttcggattaagccaagaaatagttgatgggaaatatttcgctttcatggatctatgaccttctggatagtgtaagaatttcattgaaccatcattcataatgacagaaattagttttggatcatgacatccatcaaaataaggggaagcttcccctagtggaacaaagtcaacaattgatgcagatgagtgaatggcaaaaattctttgttcttttggttgtgaataatacttagccatatgcgcataagaagataatgaataggagatcatctttccaaagttcattcttattaactggtgatacccatccgctgaataaccgtcaccacctaaaattaaaagagatgttttttctggattttcttcacacaaccacttgattgttttaattttagtcattctattcttactgaccttttgctgtttaccggttggtttatcaacatcaacatcaaataatgttcttgccaaaatcttttcaccagttttagcatcccaaaatacaatagagttgtcaacataaacggtaacacaatgtaacccatttggatgccaaacattatgtaaagcctttggatagtaaaaaccttcagcattatactcgtacatcgaattttctccaccaacagcagttttaggtagttgataaaccaaattaagcttaattgcattttctaccagattatagaccacagtaactttagggtatgagattagcaaagttccaatatctcttggatgtatcgatatacttacaacttcatgatttccctctagcctgaaaataggactttgttgttctcttaaattcaagattgtatctttaccagtttcaatgttaaatgctctgactgaaccattttttagtccaatatagacaaattctaaagagtaatcacaagcgaatgaagttataggtactttcgcaacacatgtgtgaatcacttttttagttagtaaagatatgacaaagatagaatttgatgaatccacagcaatcaaatagatacccttaataaattttaatgctcttattggactgacagattcaagattaaatgatacattaacacgggactgtccgaatatgtaaattttattgaaatttgtaatcaccgccattaaagattgtgttggatcaaatgctaatgtttgtatattaccaactataccatattgttgtagttcataaactccataagaaattgcttctaatccagatgataaattttcaccagaccggaacttccctaatgaaatattaggagttttgaatgatgttttctgtgaatttttgttcatatctggagaattaccaaaatttaagttaggacttgcaggatagtagtctctggtatcgacatcatcggttttcctggataattttttaattgacctcaaagggtttatatttaacagtgctgtaggacttttaggctctttagattctaatgaggtagagctatttgtaaaatctcccaatgtaacttcatcaacagatgaaccagctcttgaacgattcttctttttactccatggagaacttaaatttaagtttaaatcgggtgtaccgttcttaaacatgttgctatggaactatatattacaaacctataatatttgtaaagaaagaggtaaatgaaagcttcaccaagaaaataaagtgaaaatcaaattatttttgtgaggttcctaacttttcagcctccgaaattttgtacatccttgatgatatatacttcgaattttgaactagttttaggccaaagtatatatagttttaagtatattgcgttcttctttaataaagaatttgaaaatttacagaaaaaaaaatgctcttctagtttgaatcatacagaaatccaatcaatggcatgatttttggaaaacgatttggaaattcttagatttaactactgcatacttgttttttggtttggtttcgtatagattaataattatgttcgaaacctcgtttgaaatactcgtgaaaattgacgtgatcttgtttgatgttgcatcaagaaaccaagttcaacatcagaacatctacaaacattgatccaaataactattggaacaaaattttcgtattaacaactgacactccctttacacaagaagatgccgatataatattagacgtctcaaattagtaggacaatcccctttgaaggatcttacagagatcaatctgtcatttgaatctatccaatcaagcaaacagattccatcaaggttggtaaaaaaacaaacgagcaaatacaaccaacccctttcttgaaaacgcatgtaacatatttaaaaatatacttcaacgagaatctaatcaaaaatgaagtaacattaaacaaaataataaatatcttcacaaacatttcaaatgaagtatcaaacatcataaatgaaaaataccaaacaagacctaataacaagtatgcgatggttaaaatacaatttccaaaccatttcccaaaagtctatgccaaaaaggcaacttacagagcactttcaaagtatggtaaaatcattgaactttccaccattcaaaaacaaaaaccaattaacacatatatatttcaaggaatgctaatcacccaacacttcactatgtactaatggaactgaactcaatctcccttacacctccaaaggattacatctcatttgttaatggtgacagaacttcgaaacatctttcagtaccttatgacagagggctattgtttcccccatgctcaacaattaatgtaacagagcaaattaaaattctctctgaagtccaaaactggaccagtaactgaatttttttggtaatagttatatttcttctataatacttacgtaatcctatgaagttagagtacaacattaggttgttagttatttaaattattgttccttatagatgaagtattgtttggttctaaaagtagatatgcgggtagcagaatccagcatcattttacaattttaatcaaattatagatttacaaggtataatataaataaaagtatacataaaaagtatttaaatgttataacataataagtagagattaaaatttagaactagctagtagtgatgcagcacttttggcatttatatttgccatgtcatcatttagatcatctttaacatttgtgttatttgaaggggcaggttcaagagattgccttttaactcttgaattccaagaatcttgttgtgaacttgtgatatttttattttgattacttacattatccggtaagtattctcttccaagtctacccaatgagtcttgttgattaatcaaccgattattgattaatgagtttaattttttacgttcctgtataatttgatgctttgccagaattttgaataatttctttgcacttaaaaccatataatccagatattcctttgattcaattaacatttcataagtagttcttttaacttgaaacctcagttctttttcataattatgactcagttctaaacctcgtatagcttcatcaactttaattggatcaattgcagatttcatttttaacttttctattacggcatgtttcttctttgttgcttcttcagcacttattaattctctcataagtaaatgtctatttgtcaatgattctttaatattgtaagtatcatcacttatttgtttgaaaaatccaattaattcagatgttaaacttgcattcttaactaagtccacttcattaaacatcagagagaatttgaaaaactttttccataattttgacatttcttcatttttttcaatgttttccatatctcccaggatattaataaattcattattataaaatgctgtttgtctttgatattttaaatatttttctaatttctccaacagtttttgacaatttaaataaacttctttaatgagtggtctatatcgagccaaataatcacaactatcatacggaggttgaaattgtttcaatgtttttcttcttaacccagttgcaataatagaattagtcgatggttttgttttagacgatacataactgaaatcattttgttcaaagaataatgcgaattccttgtttttaataaggatgggatttgagcaaattctatttaaccaatcttgaaataaatttgttacagatgagacaaattccgttgacattggtgagtataaagttgaaattgtaggcaatgatggaacgaaaaacttcaatattattatatgtcaaatatttgtatagtgattcaaattctttatatgttctcctaacattcttataaatatctttacggaaaccagataatttaacaacttttgcattgaagttgaagattggatttttctgtgaattgctaccattagcttcaatttcttgaattttaattatcatttggaattcatctttatgtaatctttctggtaaatatcttcttaaatcattttcagttggatattcactaaattctgatatagttgatgatgtaagttgtagcagtgtttgaattagtattttgatttgcaataggtaatacagatgtttttgaaattgaggaaccagaatctgtaccattgcctagattcatttactacattatcatcgccactttcattatctgaatttgagtgaactgattcattagaatcattttcattatcttgatcgtgaaatgcagatgagacagcaccgttgtcggcaaatggattgttatcaaaatcctcaggatcgtaggatacagcagaagtcattcttgtcaaaagaagaacaaactgtacttagaaaataaaaaaatggcgacagaaagataacctgatcttattgatatatactccaacaccaagtatactctatactgtgatgcaatgtatacttccttattgagagaatcagtgtctcttaaaacgccacctgccactaaaattaatgattgatttacagaacactgtgaaagaatgagaagcctccatgtacaagtcgatcgacgctctctgttgaaatttcgtgtttttcagttgatgtattggctctttacaaggatcgattgttggtgcatgcataaacatgaaatatgtagatcagtaaaggaatttcccgtatttagcatacaaatatacactgtcaacagtactgtaacggtagatccatttttatatatattatttagttaaaaatggaattgttgcagaatttggttagtgcacctcaaactgccactgaaaaggaagttgacgacaatatcatcacgttggttgatagattagcacattcaactttagtttctgatagacgtagtgctgttttagctattaaaagttatagtcgtaactatagagaaattgttattgctaaaggtttaaaacaattattcataaccttacatactgataattccgatcttgatatcgttaaagcaatcttagaaatattgattattttattcattcgtggtgaaggtaataaagatttaacaagagattggattaatactcaatcaagagttcaaaatggtaaatatccttctccttcaattttaattcaaaatattaaacctgatcagttttcactttggattgctgatgaacttacacagagtctatcaaatttagaactattaattgaagtattggactttgatgatattcacattaaaatatattctttacaattattacaagcattagtatcaactagaaataaaagaactcaagaattgattctaaagtctccaactgcaatatcacttttatgtcaagttttggatgatgactatgaaccgatcagaaatgaagcaattctactattaatgggtattgttaaaaataatttcaatattcaaaaactagttgtatttgagaacacctttgataaattatacaatatcattgaacaagaaggtggaattcaaggtactattattgtgcaagattgtctttcattgatttcgaacttattaaatttcaattcttccaatcaaaaatatttcattgagaccaattgtttacctaaattagttcatcttattgatcaatgcttaagtattacatcattcacatggaatgttcagagattagataatttaactactactttagaaacttgcagattatttgttattaaagatactcaagatatagaagattctcaaaatgctatccttaatagtggtgtaatgttatcatgtttgaaattagttttttctttaaacattccaaatgaaattagagttacatcattactaactgtttcagatattattagaggtaacaacgaagctcaattcaaattctcccaagtggatgttccttatttagatccaagtttacctccctctgcacaaaaatttgaagaaattgtcccaattacagtagcactattaaactggtgtctttttgttaactctgttcatacatttgatattagagcagcttcttcttacttattacacgcattttttaaaaacaataatgaagcaaaattagctttcattgaagatcaagagttcacatttaacgttcttaacggaattacaaatttgtcagatacagaaggagaacctaatgaaactgaaaccgatgaattatcacctatagataaattagataatattcttaccaaaagtcacagcattgataatgaagaactaaatgatactaaaagtgatgaaacaaccccatcatcagttgaaatcaataaactggagtcaaaagccaatattttccaaactttaattcacgttgaaaattttaagctcaacccttataaaatatggtttgcttccgtcattttactttatatttttgaagattctactgattgtaaatctcgtgtaatcaaatttatcattggaagtgcagatgatgatgaatcagatgaagaagatgaagaacaagaagagcctcttttattaatatctgctactgcacaagcactatgttcttcattgaagcaatctgatatacgtgtctctattgcttatcttatgctactttcaaattggtgttttgaaagttatgaagctattgatgaaattttaaaagactcctcaattttggatcaattacttgcatatattgtcgatcctgaagcaaatgatgaattagttcaaggttctatttctatatttttatcaattatttatgaattctcaagaaaagtatccccaatacctcgtttgcaattatttcagtatttgtcaaaaagagttggtgtacatgcattcagtttgaaagtccaacaattcattaaagatccacatgtttctgaatttaaagaatttgactggttgaaaccttctagagacgattctggtttacctgaagtgtatttcgaagatattttcattcatttagtacacgataattctcaaagattaattagtgcgataggtagagatcctaacattgagcctataaaaaaacttgactatacagcatacgatcagttagaagataaacttactctattatctaatgagtatatcaaattcaagtctgaatctgaagatctttccaaaaaacagaatgctcaaattgaatccagtacatcggagtttaacgagctttccacaaagtacgaaacaattttaactgatatggaaaagttggaagaagaaaaagataaactgctaaccagcttatcttcatctgttacagaagtgaaaggtttgaaggagttacaaaagacattggaaatcaaaatttcagaattgagtaaaaaattatctgaatcttctacaagtttgaaatctatggaaaatgaaaataaacaattaaaggaaaatttgaaaacaactgaagaatcaaaaacagttgctgaaagtggaatcaataagatgagtagagaactgatgaacttaacaaaggagaaagcagctagtgaaaagactatcaaatcattagaaaaagaagtgaatttattgaaaaagaagttagaaactgttgagttgaatttaacaaaattaactgaaaccagtaatgctaatattaaaaacttagaaacacttttgaatgataaatctacagaactgaaaaatcttcaaaccactcacacaactttgatatctaccatgaaagaaaaagatgacaaaattagcaccttatcgaaaactcaatccgatttgatctctaaactgaaatcagctgctgaaattattgaaaatctaaaatctcagaaagacacatctaatacagagttatcgaagtataaagaatcactatcaatggaaatcaatgaattgaaagattctttaagtaaaattaatgaggagaaggctaaattaattaatgaaaagagtgaacttaataccaagattgactctttacaagaagaactaacttcaacatacgacagtctatcaactttacaagaagaactaacttccgcctatgatgattttacaacattacaagatgaaacttccaaggaaattgaaaacctcagttctaaagttaacgaggtgaatgtaagaaataatgcactcgaggaagagaaaaaggtcttacttaaaagcaccgaaactttaaagcaacacattgattcattagagaagaaacatactttggtagtttcacaatacgaatcagatattactcaaatcaaaactgatttttccactcaaatagatcttttgaaagaaaatttagaaaataagtcatcagaggttttaagtttacaagataagctagataaaatcggtattaaatttaattccttgaatgaatctgcagttgaaaaagatacactattaagttctgcaaacaaagagaaagagagtattcaaaaattagttgaccaacttcaaaaagagaaattcgaccttgaaacctcatttgctgataacaccacatcgaattccaaaactgtcgaagatttaaaggacaaattgaagaatgtagaagaaaaacttaaaggagctttggaagaaaataaaattatagaagctaaactttcacagttagaagcagaaaaaacagccgaaatctttaatttgaaaagctttgccggtgaattagagaaagaagttgaagatttgaagtccataaaaaatgctttagagattgaagtcaccaatacgaaaaaggaaatggagcttaacttacaaaaatctgaggctgaaatttcaaagcttacctctattattgatgatttgaacgagaaaaagaatttatcagatgaatctttgaaaaatgaaatagaagggaaaaatgcaaccattgctgatttagataagaaacttgaaatttctacagcatcactcaatgattataatgaagagcttgaaacattaaagagtaaacatcaagagttatatacacagaattctgctgtgatttcagatcttaaaaaagagttggcatccattgaaacatcacttaaaaaagctgaagataattatcagaaaacaaaaggtcaactagaagagttgaaaactatcaaagagaatgaattgaagaagctaaataatgatattacaagtattcaaaaaattcttgatgagaaatcaaaaaattatttgtctttagaaggtgaatatcaatctttcaaagaagaaaaaaccgcagagattgaaaaactaaatacctaatatatctagtattacaaaatctttaaaggagaatgaagaaaaacttgcaaaaactgaaaaattattaggtgaagcaaaactagaaaaggaaacaactgtgacaaaattagaaaaggaattagaagagtgtaaagtttctattaattcatacaaaacaaaaatatctgatcttgaactacaaattgatacattaaccgcagaaaagaattccgaaatcaatgagcttaatgaaaagctagcctccgcagttgcagtgaaagatgaattcgaaaagcaaaagttgtcattggctgaagaattaaaggttctttcacaaacgaaggataaggaaattagtgaactaagaattcaaaatgacgcaatatcttctcagttaaatacaataagtaaagaaactcaaacaaaagttaaggaactggaaaaaacgattgatgaaaagtcagctttacttacttcactgagtaatgaaaagaaattgtcagatgagactgaaaccaatttgaataaaactgttgcggatctgaaccaaaaactcaaggatttaaataaagaaatcaaagatttgaaacaggagtcagagaaagttaataccgcatttacatctacctcatccgaattgaagcaactcaagaaagataataaaaaaacgattgagaaacttgaagctgacaaagctaagctatctaaaataattgaagagaaagattctactattgaagaactgaaatcggatttagaatcctataacacttctaaaactgctgctgttgatgtgttagagaagaaaattgaaactttaaatgagttatcagaaaaacttaaatcatcttatgctgaacttgagtctaaatatgaagcattaaaaacttcttcctctgaggaaatcgagaaactcaatgataaaattagtgatgctgatactcaaattaaacatttagatgaacaaaaattgaaattagaaacaacaattgatcaaattactaaggaaggagctaaatctgaaaatgaatatgttgagaaacttaagaaactggaagatgatcttagttcagaaaaacaaaatgttgtgaagttgcagattgagtaccaggagcttcaaactaaatctgaaaatgaatttagaagtttcaagaaagaagaatgatgaattgatagagaagttgaaaactgaaacgtaaatcattaacggaatccacaaaatccttaacaattgaaaatgaaggtttgatagctgaaaaagttgaaaacgaaaaagcacttaaaacttcagaaaaggaaattgaaaacctaaatttatctattgaaaagcttacatcagataatttagttctcaagcaacataaagatgaagaagtcaaatctttacaagaaaaactttcattaattgaagcatcattagaaaattcaaaattggaagagaagaacttgctgaaagccaacgaaaaaattgcttcagagagtaaggttaaaatagattcattaacttctgaaatcaaaaccttaaactctaagctcgaatcgatttcaaatgataaagagaaacttgatatgaaactgaaaaaacttgaatcatcataaggaatcagctgttgcagaactaaatgaacaactttcaaacgctgatgaaaagctcgcaaaagtcacatttgataatgaaaagttagtcaaggaaaaagatacctaagattttaaactatgaaagtgaactatctgctttgaaagtaaagcttgaagctcaagagaaatccactactttgagtgaatctaacaacaagacaaccatttctgaatttgaaaagtttaaagttaaacacgcaaaagaaattttggagtttgaggaacaattaagtaataacaagaaagtaaacactgatttggaaaaagagattcaaaatttgaaagataagttagataacgctataagtgcaaatagttccgctaaaactaacttatctagtacaatatcagaaagagaaaacactattgctgaattaaaaaagaagatagatgctctttctaacgaaaagaaagaattaaatgataaccttgaactagtgaattctcaacttaagaaagaaaaagatattgttgaatatacaaaacatgaaaataaagttgagttagaaggtaagcaggaagagatcaccaagttactggaaaataataaggaattacaagccgaaatcaacgagatcaagaattcaaaagatgcagctgttgttaatttaagaaatgagaaagaaaaacttgtagaggaattgaagtctataaataacgcattcactgactttaaaaagaactcttcagaaacatgcgaacaactggaaaaggataaagctacactcaaagaaacaaatgaatctaaatgtgttgaatttgagtctaaaatatcttcactcaaagatgaattaaataagctgtctaaatctaaagatgctgaaattgatggatttaaaaaagaggaatgacttgatcaacaaagagaatcaagatctacttaacttgaagaaagaaaatcaagaacttcaagaaaacttcaaaaagatggaagaagaaatgaagaataaattagatgaagctttgattctatgggcagaggttaccgagaagaaggataagtacaaacaaatactcattgtgaataattgcgagtttgaagatagtgatgaagaggaaagtgacgaagatgatgacgatgaagatgaagatagtgaagaagagtaaatttcttataattataatttttatagattttagaagataagtaaacacatgtgtaagaaaacataactattcattactgttttctttagatatctaaagaattttaatatgtgatatacagtagtatattatctaatgaataactatatataaaagaaggaaatacaaatataaaaaaaacttaatgtacatgtggtgtttaataaatgtgaataaataaacaaaaactattttctgacaatggttttcattctacctaaaaatgttttctttctactcaaaccgccagaattggtcgaggattgatgagcaccatatgcaggagcaccatccacaaatgtactgtcaccctaaaccaagggtagtatcaccatgcagtttatgagatgcatttggatctgtttgaatgacttctttatcaacaccaggaagcaaagctctgtaaatcagcagaatcggctcttttcaccacaacaccattagagtaaccaggacgtggtgctttgaatagatcctttttgaactggtacaggataatctacatcatatgcattagtattatctataccaaaaaccatatcatactgttcattttttctattagttggtgccatacctttgattgaattagtttggtccatcaattgggaatgcgtcaactggagcaacccttgtgccccttattacgttgaggggtacatgcatcaaatggaccatcgtggtgaaatttaccaccaccaaaaaatccagtaacatctaatttatcaatggtatctaaatttttagaacgttcttgaacaaacttcttctttctattacctgatttatgagatctttctctatgtctgtctttatctttttttctttcttctcccatcttctgaataacgatgattactttgtccgctacggttttgacgtgaaccatccctgttagaatgtgatctttcacgtgtgttataaggatcaccagtacttttagatctaactctcccatctgacatgattctagtcgatgtggtatttgtcatcgattctggatttaatcttgctgaattgctaggatttgtattgacttagaaggaactgcaggtgccgggcgacgagtactaattgtttttggcacgaactggtgcttctgatctttctgaacttgggaatggatttttttcatctcttggatattcagtctttagcgtattttttaggttgtcacaacttcatcatatgcaggaggcggtacaaaatcaggtgatggaatagcatctgagaatgaagatcttgatggagtatgtaactggagttccagagttactacggtgaggtcttgtattggttgtgcaatggattgtatgaatctcttctattacttccacttcttgatctgttagcttctggtctttgttgagtaggcggttttaccattctatcatattcgtcaccttctgtaaaagaatttgcatcattatcatcatcgtcatagtaatcatcatcatctgaataaactcttgacctttcattttcttcttcttcaatacgttgttgatttagccaattgttatattgtacatcatcaattagttggagaagatgatgatctttgtttttgtctttcctcttgtaataatgcagtacggaaaggattgtttgtggaaattctccttcctgatcctgtagaagttgtagactggttattatgattatacatttttactttttaatttgatttgtttaaaaaagggggactaattttgtttcttatttcaaataactgatctaaaattgatttgtttttaaaaagattagacgaaaattaattgataataaatttgtcagacttcgaatgagttgtttcaaattcaaagcagagtctaaattgttctagtgtttatacctgtttgccttttataactatcaagagtcttggataacttcagaaattaagaatgcagaaatccgacgaatatcgtaaagattcagcaaggcaaaacaattaaaactgtgtgtagtgtggagtctcggctcctgttttcagaaaaagcgaattcctgtaaaaaattcgagagggtgctttttttgtttgaaagtttctgtttttagaacacgacatgatttttctcttttctttctgctgtgccgcttacccgtttaggaaacataactttcataaatttaatatatcttatagataatatatacaggtagttatttaaggacatcaacttatgcattcaattatttatttaatcagagctctttttttgtttacggctattttctgcggctttcgttatgacttccaaagtctcagcctttaactcttcctgcgccgcatttattatttcaacattattaagatctccagaacgtccatcttgaaccatctgtttgacaacttcgatatgtttcgtaaaattctcagcatctgtagcatccataaacttaccccaatctttgagtgcttgctctgaatcaaaacatatcaattcaagattattgacatgtttcaaataactcattctctgttgatcttccttagacacaattttacttttattaacaagttcctcaacttcttccttactcataccagtttttccaaatactgtgattgatgaattctttcctgtatctttgtcctttgcactaactttgataattccatctgcatcaatatcaaataaaacttcaatttgtggtactcctttaggtaaaggtgggatatcagttaatttaaacttaccaatcaatttattatccttaactaatggtctttcaccttggtaaacgttaatatcaattgcattctgaccatcaattgcagttgagtacatttgtttaattttacatggaactgtagagtttcttggaattaatggtgagtataaacctccatatgtttcaatacctaaagttaatggtgtaacatccaaaagtaaaacatctttaactgatccagataagacagcaccttgaatagcagcacctaatgcaactgcttcatcaggattaatttcagtatttggctttttgttaaaatactttccaacaatctttctaatttttggcattctagtcataccaccaactaaaataacatcatcaatatcttccacttctagttctgcatctgatagagcctttttcaaaggtaatatagttttttcaattaatggcatactcatagcatctaattcatcttcagtcaattcatagcttatactttcagtttttgttatgaaaggtatctcaattttagttgtactgacatgacttaattcaatcttggccttctctgcagcctctttgattctttgaatggcattaatatcatcatttaaatcaatttgtgtttctttatggaatttttccaatatccatttaactaataagttatcaaaatcttcaccacctaaatgagtatcaccatttgtacttctgacttcaaaaacaccatcttcaatatctaatattgaaatatcaaaggtaccaccacctaaatcatataccgcaacaataccatcattctttttacctaatccataagctaaagatgcagcagttggttcattgacaactcttataacatttataccaacaatttcgccggctgttttagttgcttgtctttgagaatcattgaaatatgcaggaactgtaacaacagcattctttatttcaccttctttcaaatttaatgccttttccgatatatgtttcatttcctttaaaatcaaacctgcaatttgttcaggtgaatatttcaaactttctcctatagtagtactcagccatgcatcaccattatcacttggtacaatggagtatggcatcaatttaacatccttttgaacctcagcgtcatcatattttcttccgattaatcttttagttgcatagaaagtattttttggattaactatccattgtcttttagcaggttcaccaactagtacatccccatttctagaaaatgcaactatggatggtgtagttcttgcaccttctgaattttctaaaatctttacatcttttgttaattgatcgactattgcaactgcagaattagtagtacctaaatcgataccaataaccttggctgggccagaagttgaattatgacgtgctatgagattttttgaaaataatttgttttgtcccaaaacaatggctttaatttttgttctagaaagcatgcttcaaaatagtaaatagatttgtttggttttattcaacaagaagtacagcttgcaatccaaagagtgtattaatcggcctggttcatcagagttactgaaatttgtgattgattacgtaaataatttttactataagtcacttgattcactgatgcctctagtatgtgcctttaaaggaatcatcgttacaattactaacattgtgataccctgcttgaatcaattttcaaagtttaaatttatatattataaactgaaatatttctcagaaacatgggttacatttggaattatataatgatacaagaagatattttttaagaaaatacattagaaatcaacaacagggcccataccaactgatctccatccatgcatatccatattccatcctttccattgagccagtctttgttttacatcaacaatatccatataatcttgagatgaattgctgatattaaaatttgtcaggttagcaaaacttgatggtgaatgatgtaagtattctgtaccacttaaaacagacataccatcatcatcatcacttgatttgatatgatgagaagcatcaattctagttttggtcaattgtgcagtcaaacgtttaacttgttccttttgtgtttcaagttcattctttatagtttctaattccatttctaaatccattttaactagtttaagctctaagttgtctgactttaaagtacttacttcagattgtaacttattattttcgtcttgcaggtcttgaatagttgatttcaaagtattactcaaaaagtcagattctccttctgtgttactattgaggatcttatcaaatgaatcttcatcattgttaatttcttgtgctgtactttcaatggcagtctcttgtggttgcactacattggatgcttcaactggttggctctcttgttgaatatcatcatcttcttgtttttctagggtatcttcaaccttatctgtttcttcattttctttatctatagattcttctttaatttcatctttttccccattactttcttcaatggttccttcatctttcttttcatcaacttctggggcagattcaccaattgttggggtatcttcacgttgttcatctgacagcacatcgccttcatctgatgcttgtttgaatgcatcacttgactcagttttatcctctatcttttcagcctctttatctgttatttcagtcgtttcttcatcagcatcaccagttgtatttgaatctgattttgtattcttcttacccttcttcttattctttttcttattttgtttcatttcttcaaacttctttcttgcagcttcaagcttttcttctttggtcatattttcctcgctcattttgaatatcttactttatgataatcgatggataaaatctttgataatctaaaagagagtccccttacacgtcaacatggatgcaacagtaagacttaaagaactgaaacttgttatcccaacatcgactcagcgacgcaataataaaatttagaaaatgatttgtcatattgcgtatcgcctaaatgaggaaaaggtaaacattgaaatatttcaattaagttactacaataggaaattttagatgattaaactgattttacttataattattgttagtttaattacaaacctagtagtttaatgagagttattacagattaaaacatttctcgtctatagattccctatattctttactaattgttatcttttttctattgttcattagaattttttatttatattaaattgatcaagtcaaaattaaaagataataacaattcaaagataagaaccaagaaaacaaaatgacatcagcttgcttacaatctgaaaatatgtatgccaaaaatttttggtccgttgataccacttctcaaagtacattgttaaatcaaaacgaaaaatcaacaaaaacattacatttactttcaacattttataaagagttcacaaacttggaaagtgaatattcaaggaaactgaattctttggtatcaagattagaattaccaaaatatgaaggttccggtacgttgaaaacgagtctagatgttttccaagaacaatgtattaacattgcagaatcgcatactttacaatccagaagagttcaagataatttacaagtgccacttttagacttaataagtgagagaaaagcaagacaaaaagcatcttgaaaccaaaattcatcaagcatggatcgaacttgggcaaattaaaacacaatgtgaaacaaaagcaacaaaatttgaaaatatctggaatgaaatgagtaccttgaaaagcacaagattaactttggatcatgtggaaagtcaaaagctagaagacaaattatcaaatatgaaaataaagatgctaaaaattagagaagaaaactgggagttagtaaataagtataacgagaaacttgattcttggatattattttggtggaatacttgtaatgatttacaaattgctgaagagaaaagaattagatttttgaaatctaatctttgggaattttcaaatatttgtagtacgttttgtgttgaagaggatcaatatgcagagaatatgagagtttcacttcaagattgtagtgctaaaaaggatatcaattattttgtttcacattatcaaaccggcgataacattttagcacctataaaatttgtggattttgctaaaaatgagcaaagaccattacatgatgaaacaactagaaaatttgatatttcagagttcccagaattaaagaaagaaatcaaagaattaccaaagaagaaaaatccaccaccaaagttgactgaagctggagaaactgcattttcatacataagtaaatccaaggaaacatataaacaattacaagaagaagcacaaaatgaagcatcacaaataaaattaacaagacctaaaagtgtatcgtctaataaatcactttcagaaccaagtacgtacaaagtgatgtctgattactctaatccaacagctcaaacaagtatatcatctcaaagtatcgatgaaagatacgaaggaaatgattatttacatactaaagagaataggcgcagtaaaagtaattttggaaattatgatgatgaagaagaatcaaatgacagaactttaacaaaatctagagacgaagaatcacttataggatttaaaaatcaagatattttccgtgattcaatgtctccatcaaaggataaaaccaaaacagagaaacataattcatttgcaacattagttaaaaataaatataatacatcaccaaaacgttattcgaatgaagtttttgaatacaaacagatattaccaacaactaatagatctaataatataataacaccaaatgaaaatcaagttaatatttcaaataaatcaccaatacgagattctaattccataagtaagtcaccaacaagtattaaaactaaaaatatttcaccacgtgaactcccaactaaatcatcggaaggataccccgttattatgcatgcaaaggcgctatatagttataatgctgcaattgaggaagaactctcatttaaaaaacgtgatatactgttggttcttcacaaacaacctgataattggtggtttgccgaaaatatcaactccggtgattcaggtttagttcctagtaattacttagctcaacttaaataatcaaaacgattttaatttccctattatgtataaacttgtataactataactaattgtaattttttttgttcatattacacaatttacatattaatgatacttttaacataataataacacgttgcagaaaatacaaacataccagttacaatcgaccagaaccaagttaaatcatctttatcttgaccaggaactaaacaattcataccccataaaccagttataatatttaatggtaaaacaattgtacctaaaactgtaatttttcctagtatatcattcatatcattattaacttttgtcatatcaatattaatttgagctaaataatttgaatgtgatctagctaataatttttcataatgatttaaattttgaaccattgtaacaatatgatcttgtatatcacctaaatataatccaatttctgtacgtggtgcaacttcccattgttcattatatcttttagagaaacctttgataacatctgcctttgagcctaaaagtcttaacattgacataactctacgtctacaatcaccaattcttcttaacatatcacctttccttttccaactaatgattttagtatcagctgaacttaaactactatatgatgtacttctcgtacaaatcgaatctttatcacccgttatattagaatttcttctctttactttaatccaaacaggatcatcatgataatcaccactcatcatctgaatctgaatcatcggaagaatcggatgtatctcctgattgcattgttataatttcatcttcaatatcgttaacttctgtttcgattgcttcaattagtggagcatatgcatcagtaatatcatcaattaatgcatagcctatccaatctgatgaaattgttaaataatctcttaataatctagcacggcgacgaacattaccagtatgaggagttggttgaaaatgaaatgttataacaccatctctgaaaacgactatatacatggttaatggtattaaatcatccttattatgtttctttcttttatttttctttgaaaatgcagaggaatttgatttttttaaatcattacctgattttctagatctttttagaactatttgaatgtattgatattgcaccatttgatgaagaatttgatcttctccttctcaaagtatccaaaattttagcaagaaatggacgatcatttttagcctttgtctcttcctcttcaagtaaatctgcatatgccttctctgcagctcttttcagtttttcatgttcttcactaacatcaaaagatgtaaaacaaacaaaataataatctctaaataattcaactttttctcttgcttcagctaaaaatatatcttctgatgttaatggatgaataccaaaagttttagaaattgccttcatttcatcctcggttggatttaaaacatcaagccaaaaaggttctaataaaggtttagaatttgtagtggttgtaactaatgaaggttctgttgcatttgtcatacttgggaataaagttgatgaatgttctatactttcgtcctttgattgagattgagtaggtatttgttgatttattggttgttgaggttgaggttgattttggttttggttttgattttgatttttgattataggttgaggaggttgttgatgttgattttcagttgagctataataacttggagagaataaatcttcaaattttcgtccaccatgtaataaacctgaaattgatggtgaatgaatagtatttgaaatatcttctctaaaatatgtaaatctgaatttagttaatttatcttgatgagaaacgtaagctggtttatcccaaggagagagtttctttggtcttaaacgaccattaattggatcaatttcttcattagttgaaacaatcaatggttcattaatatcatcattatcaatatttgaaatgattggatattggaaattaacattattactatcaaaagatttgtgacttgtagatgaagatctatctttccttaattcttgtaattcttcatttgagaattcttctaaaacttgtaaatttggccattttttaattttgttgatttcatctaatgattcaacctggaaaacaaacatcatttaatgatgaaacttcagaattacctcttgttgaaggatttgatgatgcataaagtgaattttcatcatgaatagaggtacttaaataattttctgaaaatgttgatattggaactgattttgaatgtaataatggtgtttgaggtagtttattattaggtagatacgcaggtattggaatatctctactttttctaaaatttggtgcagatgttggattattactaaatggattactaaacccattttctaaactagatgaaatattagaatttttagaattaagtattgaattatattcatgatcattatgataattatttgttgaaccatacctatcctttctatgagataataaatttgattgttgagtgaaagcatcattattctgttttattttagaagattgtttaattggtctaatcattttttcatctggatgaatatctgaataacctctatgatcagcaaaactaccatgaggattataattagaatcaatattactactattttcactcattatcatacccattgcatcaatagcattttctgtattactactatgatttgaattttacttgtatcatttgaacttaatgaagttattgaattacgataattgaaatgtttgatatgatctttcttaccatcggcattaccattatgttgtgacatactctatatgcaatagtatcttagtatcttgtttaaaagaaagaaagaaagaaatgaagagccattaccgatgaaatcaaattgaacaaaaaaccgctcctcttaactgctatcgcttacactatattctatacaatatatacacaatacttatttggttttaacacgtttggtatcagtagattcactaacatcttcaaattcaatatcatcaatatcttcttcgtcatcttcatcatctttctttttatcactattagttacagattttgcagcttccgcaattgcactctgtttctccttttcttcattctcctttgcaacttttgaatctaatgcagctttcataagtgaaaattcttccctatcatcaattttatacaatgcttcacttatatctgttgttttaccaacaagtgcattccattgttcctcagtaagtgaaacacctttactacctggtaaccatttaccatctttttgataatattctcgtatatcaacaagtttcatatttttgaatttctaacagttactttctttttctccattccaagctatattatattctatgttagtatatgtgttattattcaatgaatacctttgaatatatacatacatcaaattgtatttgaggttgatcagtagagggtactccactactactatttgcatcatcataatttctctttttaaaaatctcttaggtggcattattgacagtgttatttaaactatactacagtactcaatgtctaatagagaatacaaacaacaacatattgttattaaactaacccaacatcaacatcaagtagcattgtattattcattaatatactacataataccaatactccccataataaaaattgtttactaagtaaagcgcgaatactaatattaaacttattgcatgattacctaatctggaacatgtatttcaagtactttggatcattgatgtaaatggactggttaatgatttggaatatataggtttatgtttcagagatatactcaattgacaagaaatataatgagtcttgcacttccgaaagtagacggtaaattatcaggtatttctccacttattctcggtggagcagttttcaatactcaatataatgataaccctgatttaatgccaatccccgatttattgactaaaagtttccaaaatggtataaatgcaattgatacatcaccatattatggaccttctgaaattcctgttaggtgatgcattaaagaaattaattgatgatggtttaattgttagagataattattatatttgtactaaagttggtagacttacaattagatgattttgattattcacctgaatggattgaaaaatcagttcttagatcacttgatagatttcataccaattatcttgatgttgtatttcttacatgatattgaatttaaatcaatggaatgaatcaattgctgcattagaaatgttaatgaaattaaaatcaaaaggtttaatcaattatgttggtatttcaggttatcctgttgattatatttataaattggctaaatttgttaaagattatcctaaaattggtaaacttgacttaattatgagttattcaaatatgtgtttacaaaatataactttagaaaattattatgaaaaatttttaaatgatacaaatgttaaattagttaataatgcatcaattttatcaatgtcattattaacatctcaagaaacaagatctttccatcctgcatcaaaggaattgagggataaatgtaatcaattagcaattttattaagggatagattatcaaactgatatagctgatttatcaactcgtttcgcattaagaaaatggttaaataaaaatggtagaacagttattggtgtttcaagtttagatgaattaaatgctgcattgaatcaatataataatgtaattgaaggtaaaatggatgaaaatgatggaaaattaataaagattagtcaagatttcctcggtgatcattttaatgaaacttggtcaagtggtattgaacattaatcaatgtatattatttacttatttcatcataacacattttaattcataaacaagatacactgagtaatatataagaaactatataaaaataaataattacctaattgacttacaatttagaagataaatcaccattaagtaaatgaatagctgcaaaatcaattactttaacagtttctttcaacaacccaagtttggaaattaacaattgacccattcttccaagcaataatttttaaagtttcaccaggataaacaaaacttgtaaatctaactttgattccatcaaacataccataatgttcaattcaatgcctttgctgaaataccgaaagagcaaagtccatgtaaaattggcttggcaaaattaccacctttaggcaaacattggatcaatatgtaatggattaaaatcaccatttaatctatataaagcagctaaatcattatcagttttaaattcaaattggaaatctggattatttaagttgatttgatgaaacttcaaaatcttttaaataaaaattacttaaacctgatttattctcattaaaattttcatctttaccactaatcgtttgactatctctaataaaatatgatccaatatttgtaaataataaatcaccatttgatgtaaaagttttataaccatatctcaaaagaacattttttttacctttattatttttattaattatttgaattgggaatgattttgtctttaaattatcacttgttggaattgggaatttattaatttttagataatgttccccatgtaataatttcattggattatagttatcaagtaaatcattaaattgtaaagctccatcacttccttgattgaaaaatggtataacaccaaatgttggtaatacttggaaatttttatcaccttcaaaaacatattttaattctttgctatttgcaccaattgataaattgtaaagaattacttgatgatgatcatatgagaaagtatcttcatcatttgatgattttgctttcttactttttgaaccaattgattgagtaacagtttgtaaaattgccattgatgattgttcagcagttttcaaagtaataggtttagagaaatcacaaacttcatcccaattatcttgaatgaattcaggtttaatataatcatcatgagaaactgcaccttttgctctttgccatcttgtattaccaatccaacctgcaccaacttcaaataattcacccgttaaaccatttaattcatttgaacataataataaaaccattggactaacttgtgatggagaaaatttattcatttcatcttgtttgaaaatagttttagtcattgcagtttctgcatgtggtgcaattgcattacatttaataccaacttttttaccttcaattgctaaagatctcgtaaatgctaaaatacctgcttttgctgatgcataattagcttgaccaaaattaccataaatacctgaagttgaagttgtattaacaatataacctgatttttttgaagtgaaaattggccaaactaatttacaaagtctaaaagtagccaatacatgaattttaataacttgatcccattcattctgtgtcattttaataaatgaacgatctcttaaaatacctgcattattaattaatatatcaacagtaccgaaattatccattgcagttttaacaatatcatcagcttgtgaataaacatcatgttttgaagcaactgccttaccaccgttttcattaattaaatcaacgacagtgaaaggatcattaaaatcattaactacaactttagcaccatatttagcaaataataaagcatgagatttacctaaagccattacctgctccagttataattacaactttatccttaattgattttaaatttggtaattttgccttaactttaggtaatttacttgtaatttcccaaactttattataatcttttaacataattggataatctgtacctttaccattaaaattgaaaatttgattaaaattttctaaaattaattcaggggttaaattatcatcacttggattaaggtataaaccattacttctttgccatttaatttgagcaaataaacctgcagcaacttcataaattgaaccatttgaaggacattcatttgatgataagaataaaacaagtggagcaattttttcaggtgataatttatccaatatatgagaaggtaaaactttttcagtcattcttgatttagctaataatgaaataatattagttttaatattatatttatgaccttccttagctaaagtttcaccaaaaccaactaaagctaatttagcacaagaataattagtttgaccgaaattaccatataaaccagcaggtgaagcagtcattataattctaccaaattttttctctttaaatattgaccaacataatttagttaatttaaaggcaccattaagatgaacatttaaaacatcaataaattgattttcattcatatttttaaaacttgaatcttttaaaatacctgcattattaattaatatatcaacggtaccataattatccaaggcagtttttaaaataccttcaggatttgtaactaaatcatcataattagcaacggctttaccaccatttttaataatttcatttacaactaaatcagctgctttatttgaattacctgaaccatttaaactaccacctaaatcatttacaataactttagcaccacgtttagcaaattctaatgcataaactttacctaaaccaccacctgcaccggtgataataacaactttatcatttaatgagatcatattttatttgataaaagagatgaaatgagataaaagaaataaattatgattaaagagggtaaatgttgtttcttttataagtataaattcattgaagggcataaaccgccattaatataaatatagacaaataattgataatatctcaaatgtacatgaatgatgttaaaagcacggagtaatgtaatgtattgactaccccacaatagattttactccgaggtatatatagtaacagatctaatttgaagttactccgaaataatttgtatttgacacagtgtggagtagttttttatttaatttaaggctgggtgttgtggctggtgagtaaactttaatgtggctagtgtgattctctgtctttaattacgtaatagtcacgtgatgattatgtaatcaaattatgcttagacgtggaagcttctcgggattaaacaaatcagcatatcaaattaatcaaattgacagcacccgctaccggaattaaacgacaggaactaattttagactccgagtgaaatttaattaaaatcagttgttaatgaaattattattaattattaattattaattattaactagttctttctttaatcaacttaacagttatgacagtatttacaacaataatatcaccaaatgattgtaatgataatagatttttaaatcctaataaaatttctccaaatattgattaccaattacctccatttacatttttatcaatctatcatattcaaaaatatttaaatgatattttatcaataccttgtaaaattcattcaaattcaactttatcactaataatttcaaataattcacttaaaggttataaaaattctaaaactttaaataataatttcgatattttattagaaaattcaaaattatttagattagatttagattttactcaatttaaatttaattcaggtattttaactagaattttctcattaattaatcatttacagaaaaaattccaatataatttattcttaagtttaactttaccaattaataaaaattaccttttagatgatgaatttttatccctgattgttagatttaataatgaatttattaatattaatatgattaacttattaataactaaagatagtaaattgaaaaatttaacttggtttgaaatttttcagaaaacttatttaaatataagtttacaattgaaaaatttagatcataaagatgaaattttcattggtaatattgaaaaatatttaggtttcgtatttgatggtgatataataccttcgattgaaattgaaaataatccattatctttaacaaatagtgttaaaaatagtgtaagacaacatgtaattcatggtgaaaggaaaaatatgaatgaattagaatttttgaaaatttggaattatttaaattattggaaaattaaacaatttaaaattaaatgttatttaaataattgttcaaatattaataaattaataaataaattatcatcacaattgaataataatgaaaaattattattaccaaaagatttcttaattgaattagcaaatgaaatgaaaacttatgataataataatgatacagattctttatcttctattgaacaattaaatataattgaacctaaaactcctccaccttatgataaagcaattgaagataaaataagagaaaatgaatatttcctgaataaattgattaaattaccaagttattatagtactcattaataatttcattataatacattttttcattatcagtaaattccttatataccccacaattttctccaacacattcatttgcacaccaaatatattcattacataatgatgttttaaacataccaatttcattaactttattaccaatattataattataatttggtggtataatatatgattcaatttctatatttgatttataatattcttctaattcttttgaattaatattccaaaatttaatctcttcctcataattaatattttttagttttgggcaaattttaatacctgaattaatccaaattaattcaccagtttctgatgaaatatgtgcaggatgggcagaacatatcatatttttaccatcttcatttttatcaactgtaccaacacttgcagtccaattattatcaaaataaaattcattactatcataacctgataaaatcattgataaccaaaacatttccttatctccataacttgcaattaatgttgacctgaaaaatggtaaaaataaaattaatttaattgaattccaaaatttaattctatcaactgctaaaaatcctgattccatataatggaaatatttatcctttacatattcagatttccaaaaattctctaatttattaggtgaaacatttccaataaatttcaaaaaatcttcactcatatgataattcaagtttctatccttataaaataatgttccatgcttattgaaattgtcagaattaattaaaacattctcaggtgattgaaataaaactgtatcagtatctaaaataattgaaatttggaaactattgaaaacataagctaaaagtttattaaaataaccacgaaattcatttgaatattcaattgataaatatttggaaacattaatgaattttaaattcatcctactaccgtatattttattaattttttcaatattatcaactaataattcatcttctctatatattatctgtatcggtaattttgatttaacaatttgaagattatttaataataaaatacattcatcaacattatcatcaaaaacagttataacaattcctgtacctttaattgaagacttaaaagtttcccattggaaattttgtgataaaaatgggtaaaaaatatcatcgtaattattgtttgaacatgaattgtatttaattatatttttcaaataattaatcattgtaggatttgaatgagtgaattgagaatctataaaaggttgaaatttttctgaattattaaaagtacatgatggtgatattgatgatggtttgagggtgtatattatcaatgtaaatagtattatgatgaaagttatatgtgaacgtctcatgttgatatgtgaagaaattggttatatgatatttaaatcgatataatgttgttgctatgtttttgtttttatttcttcaaaatatttaacattaagaaatcgtgtatgtgttatttctattgacctatgataactactttgatatataccttctacttatataagttcaattctcttcctaaggctcataccataagttgatctaagaagaaaaagttatagtaaagattcagagagcgaaataaattttgaatcaaaaaattgacgtagtgttatttaataataaacgattgattaattcttgctaccattatgatataaatatagattacaataatttacagaattacacaagatctactagatttccttgatgaataagaattctcattataaggactattattattctttgattttgattttgttattggttttgtaattgaagataaagagacattacgtttatgagattttttatcattattataataggttgaatttctcttattctgattaaaattattagattgttcaaattgtttttgttgttgattaattttaacaatattttcgaaaactttatcaaataattcattaacattttccattgtaatacttgcacaagttatatgagcaactgcaccaatatttttagcaattgcattagctctcatcgaatcaactttatgaattttatcacttttcaaacctgttaatataattagagcatttggtgcataagtcattgattcaggagcccaaacttcattaatattttctaatgattcaggtgcatctaatgaataagcaattataattatatttgcatcactataagataatcttcgcaatcgttcatattcttcttgacctgcagtatcccataaatcagctgcaagtgtaatttgaccatttgttacaattgctctttgattttcgaaaattgttggttcataagttgttggaaatttaccttgaacatatgaagctaaaagtgaagttttaccacaacctgaatctcccaccactactattttacaaggagtagcatcaaaattggcattggtagtctctactagatgaaactgcatccctatactaaaagaaagcagttaatgtaaataccctattaatagtaataagagagttacccgctatattaagtaagtaagtaatattcgcgcttagtatttatacacacacactgtttttaatattatagtataaagggaggtcgctgctgtattttatagaggggggcgatatctgctttgtttattatagtgtttattatagtgtttatttaatttatttaatatttcttaatttaacacacacaattatgcctgcaaagagagaaccaaagatgaaagatggaaaagaagttaaggagagaaagaagaaggatcctaatgcaccaaagagagcattatctgcttatatgttctttgcaaatgctgaaagagataaagttagagctgataatccaggtattcaatttggtcaaattggtaaattattaggtgaaaaatggaaatcaatggatgctgaaatgagagaacctcatgaagcaaaggctgaagctgataaaaaacgttatgaaatggaaaaaattgcttatttaaagaagaaagaaactgaatatcaacaacaacaaaagggtgattatgatgatgaagagtaaatttttagattgtttttttatttagtgtttagtttagttttttgtatactataggcaattgatcatatcttattaataatattattgatcaattgatttatttactgtaggattatatattttataataataataataataattatattttattttggaaattgtttattagcagcaattgaaaaaaacaaaacaaaacaaacccattttgacgagcctcaatctacatgtacacttcatttattcaattgtattgtatatgatcactatatacacatttcaatcagtatatatatatatttatactacatttctactcctatatacatcttatactcctattatactcctatttgcagtccctactttcatccccaatacacaacatcctcattaattaatacagtggctggacccctcccacttaaacactaagaaaacgcgtaaatttttatctttaccacattttctatgttgtgtttgggtaatctctctgtgcaagtgatagttttatctctgaaaagtgtggttattggtagaatagtatgttaaatgtaggtgttatcaaatttattgtacttgatttagtatctgtgatacgttttatttaattttacacgttaattttatacttaaatcaataaaaaaaatatcttgatgagcctccaaaaaagtaaaaattaccattttaagaaaattcaagtaataaatttgaaatattatcttttaaatgtgttaactaaaaataataataacacaagacacgtaaaacactcttttaaccatatttataactgaaaatgttaattagaacacttaaaaaactttataaattttaaaaaaactatttaatctaatccttttttttgtaaaacaacaacactttcaacatgatgagtttgtgggaaaaaatcaaatcctgtaattgtgtcaatttcatatttattaccattaattgttttattaatgaaaaatttaacatcacgagcttgtgaatgaacattacaactaacataaacaatcttacttggttcaaattcacttaattggtttaaaaatgattcatcacaacctttacgtggcggatcaagtataacaccagtttcatttcctggaaaatccattttttcaaataatttctctgctttaccccaaacaaatgaacatttatcctctgttaatccatttaattctgcattcttcttagcaaacccaacagctctttcactaatttcaactccaataactttttcaactgatccagtacttgcaattgcaacagtaaataatcctgatccacaatatgcatcaactaaccatttaatattacctaatttttcactaacaaatgaaataacttttggtaaaattgatctattattttggaaaaattcatttgcaacaaattcaaatttaactgtttgacctaatcccgtatcaactacttcagttataattgcttgtggatcagttacacattctttaccaaaatcttctcttaataaaattgttgaacctttcttacttctttcaccatttttccaagatttctctaatttttccctttcaacaattaatccatctctaacactttgtgttccaataacacaatcttcaatatctaaaacatcaccaaaatatggtctaattgaacgttcacgcatacctctccattcttcactaacattttcttcctcctttaaccaagctcctttacccttccatccaaatccaagtcttggaatacctaatccttcactcccacttcttggtacatcataatgtggtgttaattttgtacgatatccatattgtaatggacttgcaacagtattttgaactttacccttccaattaacttcatctttacaaaaatgttcatatgcagcttcaacaacttctctcttaatttcaagttgtttctcatattcaactggttggtattgacatccactacaaattccaaagtatgcacatttaacatctccacctttacgtaaatctgacatttcaacaaattttaaaatttctgcatcaacataaaatttatttgtatgataaactctaatattgacaacatcaccagggaatgcaaatggaactgttgcaatttgaatttttggcatcttagattcttcaactgtcctacgatatggtctctttcttgtatttcttttttgaaatttcttctcagttgtagttgagccttcttcaccttctttcttttcgtctttcttttcgtcttccttttcgtcttcctttttctcaacatctgcttctctaatcatttctctttcattagcagcttcttgacattctaaaatagttgcaaaacttggggcacgtataattgctaaaccatcaccctttgcactcatttctaaaattttaacatttttaacaatacgtgaattaaatgcatctaaaacacctgcatcattaattatatccctaacaggattttcaacatctttaattgtaatttcattattatctttattaaaattttcacctaataattcttcaatttctaacttatgtgtttctaataatttaggtatttcaaatgattgtaaaacaccaattggacttgtctcttcaattttttcacgaggtggttttctatgtggtgctcttttacgtgtaatattatttagttctcttaattgttgtaatttacttgcattccattcaactctttcctcaacttgaatatatttagccttattaactacttgtgtcattattgaacgaactaatctttgcattaactaataaatcaagacccactttaatttacttcacacaaaactttcagtgtcaaaaaaattatttttattttttacagattgaaaaattattacaatattcaattctcccattcgctgttgaaaattttttttatcaaaaaatgtccagtattacgtaagagatgttgtaatgttcaagccacctctttgttatctacaacttattacaattacatgcatgttccaattaattgcattattccttaaaaatttatgtaaaatatatcaggttaaaccttttattctatacattgttttgattgtattttacattttgaaaacaatttgaaaatttcttaattccattcaccttgtccattttgatagtaaccatttggtccgttaggaaattgtgaataattaccattattaccactaaatccattaaactgtgcataattaccatttgcatttgcatttgcattattataatctggtgtataaccataagtatttgtagcatatggactttgacctcctttacccttagaattattaccattatttgatccataatttgcattttgtccatattgactgtaaattttatttgggaaaccaaattgtccttgtgattgttgaccttgagttggagctggagtttgagcttgtgctgatgtttgagcttgtgtttgagctgatgtttgagattgttgttgttgagattgttgaccttgttgttgacctggttgttggccttgttgttgaccttgttgttgtggttgacctgcactttgaccttgagttgatgattgtgatgggattccttgaccttgtggaacttgtccttgatttggataaccaacataaccagtttgtggttgaatataataataatatggtgatggttgataatattgtggcataccatacattggtgacatattattcattgctgccattgggttactcatatttggtaaaatattactattaactggtgatgcaacattcatttcactaccaacacctggaataccattcataccatatggattttgtaccattggatccataaattgttgtgaatacataaattgattttgtgcttgaatttgtgcagcttgtgcttgtgcaatttgagttggatcatatggtgtttgaggatttcttaagtaattgttaatatcaagattgttgtaattattttcatagaatttttgagtttgagcttgagtttgagcttgagtttgagcttgagtttgagcttgagtttgagctggaacttgtgcttgttgttgagtttgagctggaccttgtgcttgttgttgaggttgaactggtgcttgtgcttgttgttgagtttgtgctgctggttgttcaattgaaacattctttaaatcatttgcaacttgttcaatttccttttcttcaacttcctttgattcttcagcttcagcaatttcttcagcaatttcttctacaacttcttcaataatttcttcaacaacttcttcaactgcttcagcttgatcaattgcttgttcaacggcttcttcaataatttcttcaacagcttctacaatttcttcaatttcttgttcctttaattcttcctttggttcttcctcttccttaatttcttcctttttaacaactttggcaggttttaatctagctgcccaagttagtggagcatttgaagtagttgatgattctttaacttcatcaattattggttctttgacatttgaattttcaataactggtttagtctcaacttcttttacaatttcaacatcaccgttattttcattttgttcagtttcaccattaacattattttgttcatatacatcatttgaagaatttttctttaatttacttgcccatgaattacctgaaccagaaccagatcctgcacttgtagatgtattagttgtaccacttgatatatttcttttattaatattagtattggtattgttgttaaaagtttgagatgattttggtttattaaatcttggattcttatttgaatttgaaatatgagaatttcttttattttgttgactaaatgagttattagattgatattgtgatgaattattatcatcccaatgagatgaatgacgcgatgaagttgatgaagaagagtttatatgtgttgaattatgtgttgaattattattaatactgttattatctttactgttattattaattgattgaattgattcatcatcatgatcttgtgattttttcttttcatcctttttattactaacttgatcccatttttgaatttttccactaaaaattccttctaaaatatcttgtacatctaaatcaacaatttcatctttaattgtcataaaatcttgatatgaccaatcagggaaaatatcagttaatgtatcaattttaacctttaattcattggcattatttgtattattatttgatgatgatgatgtgttatttgatgtattgttattgaatcttttagagttatttctaaatttcccattagaggaagatttcttcgtttgatgttctactgtatcagtcatagataattttattatattatattatattatttatatgtgtatttggtgataaaaaaattgtattgaattgataaataattttaatttaatacgatatagctgagacagaaatgtgtttatttaaattgaattgtatctactaaaagataatataaattaaaggggataaagataaattataactaaatataaaacctgtaatctataagataaaacctctcacaatcaaaaaagtggcaatttgcgtccaattcattggaaaccactgagttttctcaaatttgaaaaattgccactcaaaaaaaagaaaatgaccaaattaaattcccctgcagcgtcgatgcgtcgcccccgagaatttttatatctccgttaaagtgaagattaggtaatacaaattttaattttccatcgctacatggaaatcttatataggattgacagaatttgagcaaattatcagtactagaatggttcagggagagccagagaagtgtgtgtattcacatggaaaagggtttgaaagtaaggaatggaacgcttgaatgtataagtatatctatataaatacaccttattccgccatgttgttgaacacagatggtgaagatatatgtagagaagttctttaaaaaacatcgaaagatatatacgatacagtgtgctgataaactattgtttcattttctttttattatagatttgttttattcatagcgactacttaatataaaatctccaaatttgtcatgtcagataagaatacaataagtttggttaatataccattgggtaaaccaattccagatatctcacattcagtctcagtctctatacctgattggaatcaatgctggcaatacatggaacaaaatgaagatatttggaaacatatcactgcaggatatccaagattttatgttaatccaatactaaggaaattaatggatgaaatgattgaaaaacattctattaatgataatgaatcatgttacatatatcctactatggaaattgctcttgattgtaaagaatttattttatcacattatgatcaaaatgaaataaataatccagttattagaattattaatgataatgaaatttattgtgttttccatccattagagatcgaagtaactgctaaacaatattgggctaaaataggtcaagctatttcatcacgtcaagctgagtgttttatgaatggtgttagtcaggacaattcatcttcttcaaatgttaaggatattttacgtgatagaattgctgaaatttatggtcattcaactaccaataatgatgtttatttatatccaactggaatggcatcagtttataatagttttaaaatcattcaaaaattaagagatggaataccagtttgtttcggattcccatttgttgatactttaagaattttaagagatttccgtgaagatgaatcaaatgaatatgttattttcttaggtcttggagatgaaggttcattaatcaagttagaaaatgaattaatcaatggattaaaaatttcttgtctttattgtgaattcccttcaaatcctttattgaaatcaccaaatttacgtaaaattaaagaattaggtgataaatataattttattattgttgttgatgatacaattggcaatccatttaacattgatgttttagaatattgtgatttagtaattagttcattaactaaattattttctggtggagcagatgtaatgggtggaatgataattttaaacccaaagagtaaaaaatattttgaatttaaacatgaaattgatgtaagttatcaagatgttttgtttattgaagatgctaaagtattagaacgtaattccagagattttgaacaaagaaatgaattaattaacaaaaatacagaaactattgttaaatttttacaagaatgtgaattaatttctgatatttattatccatcaattagtgaatctgttgataattatgatttctttaaaaaatctaatggtggatatggtggattattctctattgtattcaaggataaaaataatgcaattaaattttataataatattaaatatgcaaaaggtccatcattaggtacaaattttacattaatgtgtccatttgttatgcttgcacattttaatgaattagataaagttgaaaaaaaatggggtgttaaaaaagatttaattagaattagtattggtatggaagacataaatgaattattaaatgagtttaatagagttttaaaaactttataaaaagaagaattaaaattgtatataactttatagtcataaaaaattaaaattaaaaattaatttaatttaattgacccttagtgtggaaaacttcaagagcttcagtaattctctttgacatagtcttttcaccttctctaacccaaactcttggatcgaagtattttttatttggtttatctgcaccatctgggttaccaaccattgataagatataatcttttttattaagaacataatctctaatacctgttaagtaagcatattgagtatcagtatctaaattaactttaacaacaccattagagataccagtattaaattcttcttgagttgaacctgaaccaccatggaaaactaaataaagtggatgttttgcatcagtctttaattgttcctttgcatattcttgatgtttacctaataattctggttgaagtataacattacctggtttataaacaccatgaacattaccaaaagctgcagcaattgagaaatttggtgagattggtgctaaagctttataaacactgaaaacagtttcagatgtagtatataataaatctttatgaacatgttcattattaacaccatcttcttcaccaccggtaataccaatttccatttctaaccattggttcattttagccattctagtgaaatatttaacacaagttgcaatattttcatcatcattttcttcagataaatctaacatatgggatgaaaataatggttcattatgaattttaaagtatgcttcatcagcatctaacataccatcaaaccatggtaataatttctttgcacaatgatcagtatgtaaaacaactggaataccataagttggagcaattgatctaatataatgagcagcagcaatagaacctgcaattgatgccttttgaccatcatttgagacacctttacctgcaaaataagctgcaccaccatttgaagtttgtaaaataattggagaatttgaatctcttgcagcttctaatgctgcaacagcagttgatgatgaagtaacattaattgctggaattgcgaaacctttttgatgtgcataatcaaataattttctaacatcatcaccaacgataacacctgtctttcttgaaaggaaatctaaagtcattttttgtttaattagtagtttgtaaatatagttttaatactcaattgagttggttggaaatagaaataagttcaaaagaataaaactacatccctcaaactacgaacaataataatttaggggataaacacctgtatttataaccattattccagcatagaatcattacactattaaagtggaaaaatcatgacatcccgggatttctccccccgttcccgggttaaaaaatccccaggtcggtgagtcggccgtgtgattccccctcgttttttttcttttaaatgacttcatcacttcatcattatattcaattatggtgatataatttatttaaacataccactttggttctattttcattttacatcttaatgaaacttactttatgttattatgtctgagtatagtggtaaattcgatgcaaatattcaacaaattgtaacaaaatttaatgaaactttagaattattaaaattaaatattaaaagtattgaagttcaagctgttgaaagtattcaaattcaatcaaatactcaaacaattattagattaattactgaattattagaattaactaaaactttaaaggaaaaatggatacttggtcaagtttatccaatggatgatgatttattaaaagatcaagagaaaagtgttaaattatataatgaaataaataatttattagaacgtattgtacagtaaagtttaatgattaggagagttaataatgattatagactttttcgtagtagttagatagtatattcattgattagttatgttttgatactattcaaattactgagttaataattctcagcgaataagataatttttaattttaataggaacatcgatttttttcactagctcatctcatgaagtttaatctgaatagcacatatcaatggctcaattgaagacggacaacccatccttcaacatgaaggatatcagtggttaccgacttgcactgtttcttttaggttttttactcattccatttatagcattaacattatttttattatgttatgtccatttaccgaatattagattcaatgatatctggatcatcaaggaaattgaaaatttactaggttctgagtacattaatactttaattgatggctcaatacaattctttaagaatattatgcctatactgaaaatagtttacactatattatttgctcctacttggttaaatttttttggaatgaatattccaaagaaatatgtgatacgattgagtaagtgtattagtataggagtaagtttaacattattagattggagtattcatgtttaccaacagtatagagataacaattaagcatatccctacttataatataataataataatttttttttcatttcataacacggcataatataggagatttataaatttatataaaataacattttaaaagaactagcttttttttttatttttaacttgtatacttacttatttttcagtatcaacaacatatctacctaaaattttaccttgttccattaattcataaatttttggtaattcagataatccaacaactttaattggtgatttaactaaacctcttgtaaagaaatctaatgcttcagcagtatcttctctattaccaacataagaacctctaatttgaattgatttaacaacatgttcgaaaactgatgattcacaaattgcatgagcaggtaaaccaacaagtacaactttacctaaagttctaacatattgagttgattgagaaattgcagcaggtgaaactgatacattaataacaccatgaggaccaccattagttgcatcttgaatatctttaactatatcttttgattttgtaaaatcaatgaaaacttcaccacctaaagatttaacaaattcacccttttctgaaccaccatcaatacctaaaactcttaaacccattgctttagcatattgaacagctaatgaacctaaaccacctgcagcacctgaaattgcaacccattgacctggtcttaaatcagcagtttttaaagctttataaacagttataccagcacataaaattggtgcaacatgagctaaatctgtaccttttggaatttgagctgcttgaattgcatcagctgtagcatattgttggaatgaaccatcatgagtataaccagataaatctgcttgaggacaatttggttctgcaccttgttgacaaaattcacaacccatacaagaaccatttaaccatttaatacctgcataatcaccaatttcaaaattagttacattagcaccttttgcaacaacaatacctgcaccttcatgaccaccaactaatggtaatttagttgctaaaggccaatcacctttccaagcatgtaaatcagtatgacaaacaccagaatatttaacattaattaaaatttcatttggttttggttttggaactggtatatctttataatgtaattcaccaccattttcataaaagataacacctttttgagtttttggaattgttggagcagcagttgctaaatttcttaaccaaatttgacgatttgaagttaataaacgagttgttgaagtaattgattttgagaacataattaattgtaagttagttttggaaagagaataataaaaagtatgagaagtgtaataataataagattaaataaggttaatgtagtagtagtattataattaaaataaaaaatgggaaattcaatggccttttataagaatagcataaaaagccaaatagatgaaagatcatacacaaaataatggaaacaccccctccaaatgggatagatagatacattaaagtggggggtgtaatgaaaatagtgcaaggacaaacggagagtttaatgatgataatagtagtatttactttactactagttagatctatgcttaaatagtattattacctctattgcattgaaccttaataatataatataatcatcaactccggtgtccgaataaataccattacataatacacaccccctcttttagtggggaaatagtataataacttataaacagttattaatataaccttaactataagtcacttaccgttatgttatttttatttaagtggagtattattaatattagtattatggcttcttattggattataatatataggctttctactttttattatgtattatgtatattttttattttgattttgttagaataagagctacttacggatattgatcttcttctacatagacatacataatacgatacctgtatctacatactcattcccctcgtcaagttatgtaccagtggcaaaccaacagacacttggcagataataccggttgatggtcccttaccaatcatatcctggactatcaaccctacctaaattaacccatacatgacaaggtttggtgtataaatgagtgagaatcaatgaactttgatcattggtaggaaaaagtgaaaacctacaaattcttactcatttacccttgtgttagcacaaagttgcgtgcaaaaacctatggggtttattcaataggaaaacgctgacttttgccccatgtcataaataattgacttcaccttatcttatcttatatttcctttaacctcccaacgcatcttctataaattttgtatttgtttcaaaatatagttgattaagtaaattattgaaaatttcttgaactttcaatctttcaaatccaatacctttacaaaatgaaatttcattataattataacgaatacttcctaaaaaacttctaattttccaaagtttattgaacctgtagcaaaataatctaataacataccagttatacctaaattaccatttttagccatcctataataagtttattgttagtattttgttttcctttaatagtatttgtctaaatgcaatattcaaattcaatttttcgtattcccaaatcttaacaaacagtcacacttcactccctaagtaatccatcattcattcaactgtctgacatttttcatcagaaccctactgacattttattcagtaaacaaaagaaggtacaacttacctttatcaccaatcactcaactgtctgacatttttcatcagaaccctactgacattttattcagtaaacaaaagaaggtacaacttacctttatcaccaatcactcaactgtctgacatttttcatcagaaccctactgacattttattcagtaaacaagggaaagtgtaaaccacgtttatcactttataccccgaatcacacacccagtcctcaacacaatcctcactacaattacaacattcattccatcaacattcaacaaatcatcatctaaatcgtcaccaaatcaacgccaacatcattaatctaattcattcaatttgatatatatatcatattcattatattccttcagttcaatcaatccaatcaatccattccattccttcaattccttcaattccttcaattccttcaatttaatcaattcattcgattcaattccactctattcattcaatccaatccagttacaatccagttataatccagttacaatccagttataatctagttacaatttacaatccagttataatccagttacaatccagttccaacctaattaatttccagttaaaacccaatcataatccaatccagttaacatccagttataatcataatccaatttaattaatttccagctaaaatccaatccaattccaatctaattaacatccagttataaaccaatcataatcaaatccaggtatatatggttaattctagcagattttgattttcaacatttaatgattacataatcacacgaaagaattatttcattgctaagattcactacatggaaatgaaattattcagattaattttccattaattattctaccttgatttaatcatctaacaatccctaatatacatataccctactatctttaatgttcaaagttgggttggaaattcatacccaattacatacaagtaaaaaattattctcaaaatcttcaataccttcatttatttcaaataatacatttgatgataatacttcaaataataataaaaatgtttcatttcaagatttagcattacccggtactcaaccaattttgaccccaaattcattaaattatgcaattaaattagctttatcattaaattgtaaaattaataaattttcaaattttgataggaaacattatttttatggtgatcaacctttaggttatcaaataactcaacattataatcctatagcttcgaatggtcaaataaagttatttaaacgtcacaatcctaaattaaatgaagatttattaattaatataattcaattacaattagaacaagatactggtagatcaatttatcattcaattaattcatcaaattcttttattgattttaatagaagtaatatttcattaattgaaatggttacagaaccaaacttcactaatattgaagaaattagaagttttttacaatattatattaaattaattcaaaatttaaatatttcatcaggtgatttagagaatggttcaattagagttgatgttaatattaatattccaaatcatccaagagttgaaattaaaaatttaccaactatttcaagtattttaaatgcttgtaaatatgaatcaaatagacaatataatatattaaaggaaggattaccaattgataattcaattcaaacaaggggttgggatggtaagaaaactttccatttacgtaataaagaatcaaatgttgattatagatatgtacctgatatggaattaccaattttaaaaatttcatcagatttaattaataaaattaaaaaatttgaaatgccaatttcaactgctgaaaaattagattatttaatgaataactataatttaaatattaaagatgctagaattttatttaataatgataaattattaaatttttatgaaatttgttataaaaatttaaatgatgatccaaaatcacagaaaaaattaattaattggattaatcatgaattattaggttcattaacaaaatctgaattagaatttaatgaaaatattataaatgttgaatcatttattgaattaattaaattagttaataataataaaattacaaatcaaaatggtaaattattgttattacatttaattaataataaagatgatcaattaaaatcgattgaatcattagcaattgaatttgatatgattataacatctcaatcaattgataattcgacttcaattataattgataatatattaaataaatataatgatattgtaattgaaattaaatcaactaaaccaaataaaattaattatttattaggtcaatgtatgaaagaattacgtggtaaagttcaaccaaatattataatgaatgaattaaagaaaagacttgatatataggatataatagtatagtatagtatataggatatacatgtagataataataaatgataatagatgtagaagaatagataaataaaaataaatgaatagaaaaatagatagagataaatgcattaataacaattgagccgcctaattataacaaagaaaaaaaatccccccatataataataataatttatatcatttacattcttcaaatggtaattcaccaaaagtattttcaccactatagacaacatataaaaaaccatcatcatccttatattgatcataaattgtactcattaaagcagcagtcggtggtaaaatatctttaacgaatatgaaaatcgccttttcacttggtaaatgaattcttctacgtataacataaacaaattgtccaactgttaaatctgctggtacaagatatttacgtttatcaatatctggaatatcactatcagggatacgttcacagataactggaattctatcttgaaatttagaacaaattctttcagattcttcctttcttttctctatataatggatgttagtatgatgtttaaaatgtattaaatgtcttaatgtcttataattacttaccaaatgagtggtcttctttaaattgtgatttcattgtctctttttagtataataataactagttgcaaaagaaagaagatcaagttaaaggaagaaacaaacaatagtaatgtgtcacaatttaaaatactgatatcgctgctcttctgataagcatttgttattattattatcttattatcttacaattgttattattataatcactaatattacactataatacatttatacaatactatcagtcagctaggagatacgatatccatacaagacacataagggtagttaatattccgatttgtttataacttcgtacttcctgcaaaactaattcttcctttgctagtatcttttcaagtacttcatcttccttaactgtttctttaactttcttttctttctttggaataagtcgttctaaacgttccacggcctctaataatttggcctgtgtgttgttattattgttattattattattcttactattattcttatcattatctgactcaagttgttcaataacctctaaaagcatgtcaataggttgtttaacgtcttttaattgtacttcttcccgtactgtgccaatcactccctctacaggttttatctcctgtttcaccactccaacatcatctctcttaatatctatcttattatccaatacagttttcttctcattagttaaatacggtaatggtaatggactaccaaaatcatacctctctcgtactttaggtttacaacgtatattctccaatggtaatggatctccaatatcaacaaatcttttcttctgtggtaaataccccaatggtaatggttctccaataatatccttaactttcactttccccttaccacctttcacctcctccactctcctccacgtgtgctgactgtgtttagccactgtactgtccatgctatactctcccttaatataaacaacatgaaacgaaacagtctctataataaacaacattacgtaatgaaacctttcatttctcccaaccgccattttcaacattaaattttttcaactttgttacaactgtaaagtcaagtgaagagtcttaaagggaagatcatagtatatatatcagtggctcctattatagacaatgtcatctgctattcaacttcttaatcctaaggcagaatctgtccgtagagaacaagcattacaagttaatatatctgcagctattggattacaagatgttttagcatcaaatttaggtccaaagggtacattgaaaatgttagttgatggtgcaggtaatattaaaattacaaaagatggtaaaattttattaaatgaaatgcaaattcaaagtccaactgctataatgattgcacgtgctgcaagtgcacaagatgaaattactggtgatggtacaacaactgtttgtttattagttggtgaattattaagacaagcacaaattttccttaatgaaggtatacatccaagagttttagttgatggatttgaaatttcaaaggatgaatcattaaaatttttaaatgattttgttattgataaaagggaagattttaaaaatttatcattaaatagagaattattattacaaattgcaagatcttcattacaaacaaaagttaataatgatttaactgaaattttaacaccaattgttacagatgcagttttaaatgtaattgattatgaaaatccaaaacaaattgatttacatatgattgaaataatgtcaatgatgcatgaaacttcaattaatactgaatttattaaaggtttagtattagatcatggtgcaagacatcctgatatgccaaaaaaagttaaaaatgctcatattttaattttaaatgtttcacttgaatatgagaaaactgaagttaattcaagtttttattattcaaatgctgaacaaagggaaaaattaattcaaaatgaaagaaaatttattgatgataaattaaagaaaattattgaattaaagaatagtattgttactgatgaaaattctggatttgttataataaatcaaaaaggtatagatccaatgagtttagatatattagctaaaaataatattttagcattaagaagggcaaagagaagaaatatggaaagattacaattaatttgtggtggtgaagcacaaaattctgttgatgatttaaatacttcaattttaggattttcaggtttagtttatgaaacttcaattggtgaagaaaaatttacttatgttacagaaaatgttaatccaaaatcttgtacaattttaattaaaggtgcacataattatattattcaacaaactaaagatgctgttagagatggtttaagagctgtatcaaatgcaattaaagattcttgtttagtacctggtgcaggtgctttttggatttcttgtcataaacatttaattgaaaataaattaattaataaaggtaaaaataaacctggtattaaagctttcagtgattcacttttaattatacctaaaactttatgtaaaaatgctggtttagatgttttagattcaatatctcaagttcaagatgaaattgatgatggtcaaattgttggtattgatttaaattctggtgaacctttagatccaacaattgatggtatttgggattcttttagagttttaagaaatgcaatttcaagtgcaactggtatagcttcaaatttattattatgtgatgaattattaaaagctggtaaatcttcacttaaagaataatgatcttaattataatcatactaatgttttataaaaatctttttataacttaaacatctataaaattttgtttaaataaaaatcttctacattgataaaataataatattatgtatactctaaacccacccacattttttttgtttttgtttctatttcattaacctttaacacttacaataaatttcgatttaaccgttcgttcattatttttaatagagtttaattcaattatttgatcttcaatatttttcatttcattcatattatttgctaaatatgcaagtctctctaattccatcaactttttattgaatcctctcttccattcaatatatgaattaaaacttttaaaatgttttaaaccataagaatcttcatcatctatatcaccaatctcactgattttattatcgtatatacaaaaccaattgccatttctatcccatatagtaatacctttaaatttttcacataatgaacattcaagttttgtaggtatttcaatcccacttaattttcttgctcttggtggtaaactagttgaattaacggtaaatccactattagaattatcatcatcactaccatctttgttatatacaacatcatctaatgggaataatattttttgaattaaatttggtaaccatctagataattgaaaccaaccccaaaaaacacctggattttgtgaatgataatcattatcaaaatctggtgattgcttgggaaaacttctatagaaaaattcactcggttgaggtggtgaaccaccatttgtccaattaccttgaggtactaaaggtgataaaattcgtacaattgatgatgaaaaactttcatgtggtgatttaatattgatatcatttggtagaaaagtatgaaataaatggatatatcgatgataatttaaatttaagaattcacttgataggatttcatttcgactcttatcatcaattaatggataatttgatggtatccaattaggatatgcatgtgtaacatgaaaatataatgcatccgaaatcggagacagtttagctaaatgtagtactataggatcatcatattgaattgaaaactcatgaaacatattcttagtattgttatatataagtttcactatctacttaggtatattatctgataacggatggttctatctaagtgaaatcaaataccatccaaacagcaatgagatcaagtcaatccaccccggaagagtttaaaattgattttttttccctgtcaaaataatttttcactttctttaattggtgattacgtactgtgtttgaaggttgactcttgaatcatccaggtacaacttaatggtatagatattacattgatattatgatatacagtgctagctattaaattatttattactatatgcctcttgcagttccttttcgtgcttcttttgcatttgttccattaatttacggaattctgctcgaagaattgaaactgagacaggtgaaacaggtgatgatggtgtagatggtattgatgaataattagtttttggactttctgggaatatactcggattagctgcactgtttggtggtgacattaacgtgcttaccggtaataaacctaaataatcaactttaaataaattattttgcagttgtaatttatgcatctctttattcatcatatcaattcttttctcatactcaacattcttactctctgccttcagtaattcatttgtacatctagccagttcatcattactctttttcaataattcttcacatttctcatatttacttgtcatcagattagcatatttaacatgatgtgacatttcttcctcatatttctttgtaagataattatgtgcaaattgtaaatcattcaaggcagtttcagtcttgtttttattactgttattatcattcttgttatctgttattggtgtagtacttttatttccattattatctgcaattttatagatacattctttaaaccatttcatacgtgtatccatattcgtcatccctctttcatcaaattcaggtaaattgatatttttctgtactgcaattgtaagtaaaatactaagtaattcaccaacgagtctttcattatcattaacatcactctttgatttatcatttgtcgatatatctaattcactaatatacccaagtttcattaattctacataatgtcttaacaatttactatcagttatttgaccaagcgattcttttaaactttcataattcaatattttcttattttgttcattgttcgagttaaattttaattcatattcaagtaaacttctttcaataagtatattaagatcaacagaatcagcaatactactaccatcactcattgaaatcatatcatcttcaatggtattggataaattagttgtatattcatctaaataactattaccaataaaatcaggctcattatttttcaatgattgaaatccgtgttgtaaaaatccgaaaacatcatcaacaccctgtaatttatcaacatgttccagtcctgctgtatttgtcctatctaataacgatattgctgagatcatcttccctctgttacttaatgagaacaaacaaagaaaaaaagagttgttgttgttcctgtgaaaaagactccatcgatgatcgatttttgattcagaatatttttttttacataacaacgcgttctgtacgtctaatctaataatttttactataatctaagcagtttctaaaaagtttataaattctatttctatacacatgcaattctaaataaggtctttatatttattataaacttcatcaattgcattataaatttcttcctttcttttatcatcaataaaactaccataaacaccatttttagcaattttaacccattcttcaccagttaattgaaatctatcttcaattgcaatataattatctaaaatataaccaccaaaataagctggatcatcagaattaatactaaatggaacattaaattctaaaaatttacgaattggtaattctttaacatcattaacaacttgtaatttaacattacttaatggacaaacacttaacataattttattatctgctaatcttttcaataactcatcatctctatgactttgaacaccatgatcaattcttgtaacatttaataaatctaatgaattagttataaaaattggatcagcttcttcacctgcatgagcagttaataaagcatttggatgattctctttaactaacttataacaactttcaaataattcaggtgggaaaggtttctctgatgaatctaatcctaaaccatgaatagtaccatcattataatatttatgagcagatttaattgtttcaatacaatttggaactggtaaatgtcttaataaacacataattaatttagttgaaatttttaattcttcttcagcctttttacatgctttatttaaaccattaacaactgtttcaattgaaatcccacgttcaacatgtccttgaggatcaaagaaaacttcagtatgatgtaaaccatcacttttagcttttttaaaatattcatatgctagatcctcaaaatcttgttcattaattaaaactgacataccaatataataatgatcaaggaaatcttgtaaatctgcaaagttatcatatctttcattacataattcaacacttccagggaaatgatcaggtaatgtaatattatttctctttgctaatgaaaataaaagttcaggtgacagagtaccttcaacatgaacatgatgttcacattttggtaattcatgtaaaaatttatgtttatgttcagaaatattacaagacattcttattgatattgatatctaatatttatattatatagcaaagcaaacgagagttaagaagatcaaagaatagaagaaaagaaaaaagaagcaatgaaaatccaccaagaaaaaaaaataattcatgattaaagggtaaaaaaaaatattttttttctttttctccaagagataacaaacaaaaacatcaaatttttcttatcaacggaactaaattgaacttgtgtgattctttttattgttattagtttctttcatgcttctaatctgatttctctcattgcatatatttattagtgttagtattgtatgattgagtaagtacattgataagcttaaatccaggtataatcatcaagcaaaaaagctgatgaaccaagggacttttctccccgcggttagcacttattgtaaagatcggaagctaacaatgcagctccgacgtggtccgtaaacatgaatagaatacctaatactggtatactttcaagccaaacacagaccataccaaatttaaacaattcaccctctgcatctttacccttataaacaatttgacgtggtctctgtcttgttaattgcatcattctttgttgactttgtttaccaatattaagtgaattattataatgaaaggctaaagtaccaataattggtattgttgcaattataattgaataaaaaattttagtaacagttatagtaattgaaattggatttatatccattacttgtgcaacaattgtttgaggaactaatcttttcaatttaccaggtataacaactctatcaagtccatttaaacataaagttgtatcgaaaactttattcaatttccccttaattaaataattcttgaaaatttgattattaacagaactacattgttggaaagttgtaacaattgcaatatgaatacctaatggaccatacattaatgcattgataattaaattcaatgggaatattgcaccaaataaaattgtataaacataacaatgtagtaaaccatatggaataattacagataagaaaattggaaggaattgatcataatttgaccaaaagaagtaaaatcctttgaaaggatagagataagattgatctgttaaggaaaatatttgagttgctacaatgattggtcttgaaatttccattataatacgttgttgaacggcattttgccaatcaatatgtaatgcagtgggcattcctttgatcagaagaggaagcaaataataaaaagagatacacttacaatacaatacaattggatgagccgtgaacaaaatttgaaataatttgaaaatattgccccttttttctccattatagtaaaatttaaatgattagaagagatgatatagatacaaattgttatatgatttatattaatattaataagtctattgtgatttatttatgtaaatgcatttaatcgaataaaccgaaacccatatcatcatcggattcttcagcttcttcttcagcttcttcagctgcagcttcttcagaagcacctgcagcagcaccggatgcagcagcacctgcaccaccaactggagcagcagaaatcttttcattaccttcagcaattaattcttcaactgatttaccttctaattcagagattaatttatctaatttttcagattcaacttcaataccaacggatgaaagaactgatgagacatcatcagcagttggtgcggttttaccggagttgactaaaagtaagtaagcagcaagatacttcattatttatgtatgacgatagaaacaaattcaaaagattttaagtcaatatcaacatcgaaattcaaataaaatttcaataaagtatgctaaaaaatattccatatagtattatatcatcaactaatagtaaatcttctcaagtgaacgcttacttagtgaggatattgaaaaatatttagaaaatatgggaaattcttacaacattggtggtttgagggtgtatagtacggtgaccggcaattgtgcctttattgtgcggtgtgcgggttatttcttattattttgtgcgtcttattaccgcattaggcaacataggaaatcattagaaaaaattagaaaagaaaattccaacagagcgagagttccctcccactgctctcccgaccagtgtctcccccagtgtctgttccccagtaccagcgctgaaggtgaaaataatttttctattgactgttgaaggatataccctattaagaatttaatattagtgataatttatcatcattttactaaaattattttgaaattatttcatattttttaaaagactaagacttactttcaatagatcaactaacaatcatgtctaccagtatgtattacatatatcacaaattaacctataatggaatgctgtctgaaaaattgaatccctatatttaatatgaaattattgaatgaattacgatatatactgcaatacacactaagattatacccatttttacatgaaatatgaaatatacatcatatcatatataccgtaataataccacattgaatcatttaaaatcatattacgtgtatgaaattattgaagacagcattttatatcggaaaaatattttacaagtaacataatactaacataattactcctaatcactattttttttattacagctgaacaaagaaagaagagatccttcaagtcattcacattcaagggtgttgaactcgaacaattattagaattatcaactgaagactttgcaaaattatgtgatgctagagttagaagaagattctcaagaggtttaggttcaaacactatgcacttaattaagaaattaagagctgcaaaattaaatgctccagcaaatgaaaaaccagctgttgttaaaactcatttaagaaatatgattgttgttccagaaatgattggttcagttattggtatttacaacggtaaagttttcaacactgttgaaattaaagctgaaatggttggtcattacttaggtgaattctctattacttataacccagttcaacatggtaaggcttctgctggttctaaattaagattatactaatcatgctttttattaaattaaaattatattgttttgtattgtataaatcttatccatctatctttttaaattaaaagaaaaaaaattaatattaagttaacatcaaatatactagcgtattatcttaattaaattcattaaattacttattattatacattattatacttcttttttcattttaattcctaattcctttaaatcagaatcaatttcattttctgaacatccacttaaattatttaatgaacttggtattatttgtttatagtttattaaaccttgtaagatacttaattctttgaaaactgaatttctttgatgtgttaaaattggtacatattgattaatattaaattcattaattgattgattaaattgataataatcaggtaaatttaatgtttccatatccatcattcttctctctttattaatatcataccaatcagttgtaattttaacaacttcatttgtctttaaatcttgtcgaagttttaaaaattgttgatgtaatgaaattctattagctctggtttgattatctaaacattttaatttatatttttgtaaattcattaatctttcagttttctttttaaaatcttcatcaaccatcttcatataatcaattaaatcaggatgttgattattttcacataattttaattcaaattcaagttttgttaattgtgtttcatataatttatcctttaattttgcaaatttaatctctatattctttaatccattcattgcattatttctttgttcttccttttccttctcatcaatttcagcatctgtatccctttcctcatcatgcgattctccttctccttctctttctccattacctccttcactgtttttctctgttttaacttctttcttattttgattcacatcatcttcaccagtatgttctatacctttttcgccatctttttccattttattatctctctcctcttcttccttagtttcatcttcatcatcaccttcatcgtcctcaccttctgcatcattatcatcatttattgcatttaattcaacagctgtattatctttatcagttatcgcatattcttcatcattattattttctttatcaatggtatcattaacacttactactttttgttttttacttaaatgttgatcataatgttcatcattatcaacattatgatgattaagaccatttgttttcttcaaagtaggacttgatactgttacatttaatgatcttttaccatttgacatgatttctaattgactatcacgatcatcaattccttccattttatcagtttcagcatcactagatggtggttccttattctctcttctagcaaatggcattatattgtccctgtaagtaatgttaaattccaaacagtaaataatattatcgatcaatagaatattaatttaatcagttttgtgaaaactgcaatgtgaaaacaatagaaaaaaaatttatgattacgtaagtatactatattctatagaaaatgaaaataaaagatctctatttctttgctttgttaccactactacctcttggtttgctaccatttggtttgctaccatctttgttattaactggcttaccctttccaccaggtttggcagctgcctctgcttcaagtttttcacggaatgctttacttctactagtaattttagcatctttctctcttctctccttacgacctccatgtctcttcttatcaactttaccacctttaccaattggtgttttacccttagttgcacgttcaccttcaacaactaatttacctaatgttctacgatcggttttacctaattgttttgcccttccaacaactgtcttttgtttatcatttaatttagaaaattttgaacgcattgtttcattattacgcattgtctttttacatctagttattcttaatgttctcttattattcatttttttatcatctaataataatgcttttgtaacataatttgaatcaataaattgaacaattgcaaatcctttaccatatgaagttttagaatctctaattatacgaacattatcaataacatttttcaaacctgtatctctttcactatttgaaatacattttttattaaaatatttccataaagtttcttccttttcttggaaatctaaattaccaacaaaaattgataatttattatcctttttatttggatgtgttaaatgatcaactctaagatgatgatctttataaacttgtccatttaattttaatgctttaagtgaatcttccttatttttgaaaacaacataactattcataacattctctaaatcaacctctttacttataaatgcaactttacgtggtgcagtagttgttgaatgaattgatctaaatcgtatagaatcaattaaacttgtatgttctggacaattaagaaatttattaataaataatttaaaatcttttgtttctctcttatttgacataattatagctggaacattaccaatgaaaattgtacgttctgctttttcaaattctttatcctttaaatcaagaatttttgctgcaccaccaactttagactcagtagtttcaccctctgttatagtttctgcgtcaacatccatttcaccatcttcagttttttcatcagatttttcatcagatttctcatcgttctcatctttttcgtcttcgtcttcttcttcactttcttcatcttcatcttcatcaactaatttagacatatacttactttctagatctggattttcttccttttcttcatcagaatcaacatccattgcatcaccatcaactggtttagaatcaacattttcttcttcagcttctacttcttcttcaacaggtgcatttttttcctgtcttctcttttcctttctttcctttttcttcaattgaacaatagttctagtcttttcagcaactatcttctcattatcaatgacactaggacttagcaaataatccagacatcgttccctgtcctctgtaaatgaacctttcactactaaaacattataagaaattaagaattttgaaaaaaaaattttatctactttcccatttaggaaagttgtgcaaagaaaagaaaaaaagaccgactgatcgacgcactgcttttgccacatttcttatctttaactaagatagtggctcaatatctccttttttacgttttgtactttactggtttctctttcttgaacttattagagggcaaatgggtcaatctgcctcaaaacaactcaacaacaacaataacaagaaaccaacttatgtctctgcattaccttccagtgatgcagatgatgaactaatctacaaattacaaactttacttaatgtcgacgataatgatagtgatgatgatgatgatgatgatgatgataagatttctaaatctctattaaatacctttaatttatcagaatggaaggaaaatattttagctgatcctaactaaaaaagttagcaatgaattgtatgacaggtaatgatattgataaaattattgcaaatactgaaaagcaaaatttaaataatattgatttatttaattataatgttaaatttgaaggtcatccaattacaaatcaaaaatcttcaggtagatgttggttatttgcttcaactaatgttttcaaagaatttatgaaatcaaattataatttagaagatttcgaattctcacaaaattatttatacttttatgataagttagagaaatgtaattggtttttaaatagaattttagaaagttatgaagatgaaattgattcaagatatattcaatttttatttcaattacctgaaaatgatggtggtcaatgggatatgattgttaatttagttaatacttatgggttagttccaaaatcaatttatccagattctgcatcttcaattaattcatcaagattaaattattttattaataataaattaagagaatttgcaattgttttaagaaatttaaagaaagaagaaaattcaaattcagagaaaattgattcaaaatcttcaaatattgaaattgttaaaaagaatatgttaaaggaaattcatacaattttaagtttaacattaggtataccacctgatccaaatgattcaattgtttgggaatataaggataaatttggtaattatcataaaattgattcaactcctttagatttttataataatgttttaaattttaaagcacatgaacatttttcattaattaatgatccaagaaatttagaaggtttatatactgttgataaattaggtaatattgaaaatggtaaaccaattgaatatgttaatacatcaattgataatttaaaggaagctgcaattcaaatgattaaatcaaatatacctgttttctttggttcagatgttggaaatttgaagatactcaaattggtttattagatgttgaatcatgggattataatttaggttttggtatcgatatgaaattaactaaaaagcaaagattattaacaggttcatcacaaatgactcatgcaatggttttaacaggtgttcatttaattgatggtaaaccaattagatggaaagttgaaaattcttggggtgaatatggtaatcataaaggttattttataatgtcagataaatggtttgatgaatatgttttccaaattgttacaaatgaaacttttacaaagaaaaaattagttgatatttggaaatcaaaggaatataaagttttaccatattatgatccaatgggtgcattagcttaaaaagtaccattttacattatctatatccattatcattatttttttattattgattactattacacattatttggttaattagatttataaactcttctcttttcgtttgtttttacctacgtataactttttttaaaacccctcttttagtatacttaacaccgtctgaacctattttaacacctttaccaacaatatcattaaaagctggtattgcaccattaacatgataaagaggattttgaatttcttcattaaatgtatgtttatgttttaccttaattttatgtttactttttttatgtttatttccattaatttgtctattatcataatcatttgataaactccaatcaactccaattgtttcccaaactgatgcagctatatattttggcattttacgtccatataaacattgatcaatcatccacataccaacaataaattcttcacatgttaatgtaccatcatcaaataattcacgatcagtttcaaaaaaatcataactaaatgttatctcatttgaaggttttatcttctttatattgttaatgtctgttgttggaacttgtaaaatattactatcattatgttcttcaggtatgttagattcgttatgatctttatgatcttcatcactacaggtatcacttccaatatcactatcactatcacaatcagcttatcattttcactttgatcattgggtttccaattcattttcattatcattttcattttcactttggttttcatcacccttcaataattttctcagttgatccattacgatgaaattgatggtataataatttcctttgttaaccattcaatattaccactattaacatacttaatccattttcttttcctatcatctaaaactaaacttccaaattttcattaatgttgttatatctaatttagatcttaaccaaatttctcttactacaattccatgaattctttcatttttattcactataagtattaacaaattcagataatactaaatctttattatctttatcattttctttagatagtctgatatctaaatcaaggtataaatttttatttgcagcaaaaacaccttcatatcttttcctttcatctgatgtaattatatttaaattaccacgatcatgatttttccaaggtttatcttcattaaattcatgcttatttttaataactctaccaaatccatttcttttctcattatttcttaaagttgttttgaatactaattgttgagcgggtatagtttgttggtatatattagtattactattgtttggataattggtaattgaatgagaatgtaaattagtagtagagtcataaattgaatgattatcaataaatgaaggtgcagttgatggtagaattgaatcattaattgaatcacttaaattcatttgattaacatgttgaggtaacattgaagttgaagttgaatattgatgattataatttctacgttcacgttcacgttcttctctaatattctttggtgtaaagaaatttgtcagtttttgtgatgctgatgttggtgctttattagatactattgaatgagaatcaaaactatgatattgttgtaaattaggactagtttctatattgattgagatatttgaatttacattcatattgctaataccaagattatcataatgctggttattattattgacgttattgacattgttattactatcaatcgatatttcagaagtatcagtagttgtagataatgttctaggtggaggtggcggtttccttattgacctgtttttccttaattgatttaaattcccaccagtctagtgatgtattaaaattatcattcaatgaagaagtttttatagttagtcaaatgatttaaatttgaattattaactttaactaactttggtgatgaattatatgaaacaaatgatgaaggattattttttgcaattgatgcagcagcagctaatgcagttgaatgaagatgaattatttaaatcattccatactgtactaccagattgtgagtcaggtaattgtctggcattagtaatattattagtattagtattgatattaatactagtactgctattattagtaacattttgatccgaatcatgtcgtttgagtatttttggtgattgaggagttcttaatgatttcaaatgtttaggttcatgtgatagaattgatgaagaatctatatgatcagtaatgacaggtcttcttctatattcatgttgtttaattgatccctgttttaatgtacctgtattatttacactatttgatgaattatgagcagaagcagaagcggcagccgcctgagcagccagcaaagcagaagaagaaggtttcaccattgatgacaatacgcctccttcattagtcattgtaattgagccaattgcagatgtatacaattccccagaagatggtttccctacttgccaacacttgagatgtcccaagccatcgtgaaataaaataaaataaaaatatttatgtaatcaacttatatttgaaacttaattggtgcacagattgagaaaagaaaaaaaaattctttttctgagagatagctactatttacatgaaattttgatatttcttagattaatggttgaaaagttttttttattttgtttttgacttttattttcacttaattgttacttcaatttagtagatatcacatagtaatgactgaggaagtaaagaaagagtcttatgcaactgataagaaatcactggcattcagtgaacaacattatttttcctcatatgatcattttggtattcatgaagaaatgttaaaagatcgtgttagaactttatcatatagaaatgcaattatgaagaataaacatttatttaaggataagattgttcttgatgttggttgtggtaccggtgtctttaagtatgtttgcagctcaagcaggtgcgaaacatgttttagcagttgatatgtcaaatattatcgaaatggcacaaaaagttattgatcttaatggttttagtgataaaattacattatttagaggtaaattagaggatgttaaattaccttatgataaagttgatattattattagtgaatggatgggatatttcttattatatgagtcaatgttagatactgttttaattgcaagagatttgtatttaaaggaaggtggtttaatattccctgataaggcaagtattcatgttgcaatgattgaagatgaagaatataaaaatgataaaattcatttttgggaagattcaatgcaattatatggttttgattattcaccatttgttaaaattgcaatgtcagaacctttagttgatattgttgataatggttcagttgttacaagtcataataaaattattgaatttgatcttaatactgttaaaattgaagatttagcatttcataaagaatttaaattaaaagcaactagagatgataaagttcatgcattattatcatggtttgatattgatttcccatctgatacaaaggaaaatattgttactttttcaactggtgctcatgcaacttatactcattggaaacaaactgttttctatcttgatcaagtattagatgttaaaaagggtgaagaaattacaggttcaattgcttcaagaccaaatgaatttaataatagagaattagatattgaacttgattgggattttaaggcaagtggtgaaaatgattcacgtaaacaatctggtaaatataattatttcttacgttaaatatcaaaatcatctgtgtaatctttataaattattttctaatagaaatatggaacagaaagttaaaaaaatgaattctaaagtgaaaaaacgtgtatgataagtaaaataagtaagaatttaattttatctcagaactatttgaaaccaaaaaagaattcttatcatagactagacatgcttttattctctgaagcaagtttcatatcttaaaagcttaattaatagcaaataaaaggaacgatttggccatactatagtaacctattataaaacaaagattttctattatcataaacaccgcgatttcggagatactcctatatcaattttgtacctatattttgaattttattgttaaataataattctgttttctcttctctgttgtacattctgttatctcaaacaatagaaacaactattaaaaaataatggaatctcaaccgcaatctcaagatatattctctatcgatgatgatttcaattctttgtatattaaccggaagattaaaccgctttacaaatacattatggcatctttaataatttcaattgtttctataacgttattgttctttttcaaagcatcaacaggatccgaagtattagcaacaaatcattataattataatcttaatgaaaaagtaactcttgatgatcaatattcaattgataatttagaaaaacttttctatactaataaagggataactcatgatgtattcgttaaaaaaattcattcacataatgattattggagaaatacaccattattagacgcaatttcattaggtgttcaatcagttgaagcagatgtttggtattttcctgaaaataatgatgaaacagtttatgttggacattcaatgaaatctttgaaaaaaggtgttacattagattcattatatattaatccattaaatgcaatacttaagggttcaaataataaacaagatgattcagctgatattataattaaagataataatgatataaatggagttttcgatactgatcatgaaacgacattatatttatttattgatttaaaaactgatggtaatcaattatttgataaaattcattcaaaatttcaaaattttcataataataaatggttgagttattataatcaaacaagcgatgaattcaaatggggaccaattacaattattggtaccggtaataccccattggataaagttaaaaaccaaggtgagattaggtatattttctttgatggtccattaaataaattaaaggaggtaagtgaagatgaaatcaattataaggttagtccaattgtatcatcatcgttaagaatgttagtacaacaattggaaattactgatttattaaatgatgatcaagttaaaaatattaaagaattagtcgaaattgctcataaaggtaatatgaagacaagaatttgggatactccatggtggccagttaatttggaaaggggtatttggagacaaattattaatgatattaaatcagactatttgaatgttgatgatttagtagaaggtgttgagttcaagtggtgacgaataaatttaaccaattataatgttatgatggggtaataagcgaacatactaggaaactgcataaaatccggaaagtttaaaaaaggttttgatgaaagtttaagttaaaatagtgctattattagagtttttcaaagttgtttagttaatcaatatgatgtataccttcgtatttattgttaaaattttaatgaactggtgtcatatccactcccgacatcgtctgattgtttttatatgatatatcaccataacactacccttattgaacaacttattaattattaattattagttattagtttgatatacctatcacttcaatcagcatactgttaaaatacctaattcagtattgatattaataacttaacgaataatcccattaaacacaatgcaaaataatctcggtgttaacattgtccgtatatggtcaactattaaaatcaaccgaataccaagtaaatagcactctataaactaaccctcagtgattgttaacactgccattatcccgagtggaaaattagttaaaaagtgagaaaagagaaaattagccggaaattattcggagttgtaaaaacagttcgcactaatttaatgccgattaccggctattttagttaataaaattttagttaatgcagcatgagttacttttacgagtatctgggaaatgctctgaagtttatctctggtataataacataataacaattcatcctttgttgatataattatcaattgactaagatgacgtaatttatatcatagtaataagggttttaaattttcaagcgataatgtattgtaaaattatatagggtaaacatagtaataacaaagaaaaagattgaaaaatcagagagaagattagggaaggccaagaagtgaacgtgaaaagtaaatgtaaatgaaaatgaaaaattattaaaatgcaaaccagcaattgtgaaaagtttttgatttagtatgttccaagtactatggtcaaaaaattttgtaaattggtggctggtcttgataattttttttgtagatgattgcattaaaaaattgaaaagaaaaattaaaactgcaaaatttcattgtaattactatactatactatattattatgattgttttatcaggtttcatttatttaattgatacatttgataaaatagataactgttccaaggttaactaaagtaacataaatgtaagtgaattaaacgaatgaatgagaaatgagataatgtaaaataataatagcggtaatagtaattaataataaaacataaattgaattgtaattagtatgaaataaaatgaaatgaaatatttgatgaatagtggtagcaattaactgaatttgtggaaaagaaaaataggaaaatatggattgtcaatttgaaggaaaaaaaataacgattttgaagttttgaatcatgaaattatgataactcattgtaaaatttaaattaaataaatgttaaacttaaataccatttaaggttgcagaatcttttggttcaagaacatttaatttatagaaataacttgtatcaccttgaagatcaacattaccagctggtaaataatcacaaacaatataataaccatatggtgtaccacaatttttataaccacaaccaacttgagttgtatctttccaaactaattgagtaaaatgaccagttgatgcatcaaattttggatcactataattataatatctaatttcattaaaccatccttcaactgcaccagcattttcaaaattataaccataagctaaattttcacctaaatcttcaccatttaattcgaaattattatgtctaaaaacaccatcacattgccaatcatctgcagcttgttgagtaagttgtgcaatttgattattccaagttaatggtccagtatcttccattaaacttctaagttcattatgtttagctaaataaacatcttcaaatgaaaattgagttgaagttgcagttggagttgcagttgatgaagttgatgaagttgatgtaattgaagttgatgaagttgatgatgtagaagtagttgaagtagttgaagtggatgaagtggttgaagaagttgaagtagttgatgttgaagaagttgaagtagttgatgttgaagaagttgtaggttcagtagttgatgaagatgtagtttcagtagcttgttgtccagctgcagtttcttcagttgtagcttcagtagtttcagttgaagatgatgaagatgtagtaattggagttgaacttgtagtagaagatgatgagcttactgaagtaattgctccaacaagtggaatattagtaattgaatattcagttgttgtttttgtagttgcacaatcagcaattgaagattgaacacttgcagcattaatagctgaaattgataaaataacggaagagagaagagaatttgaaaacttcattttgttaataagtattattcgaatgggtatccccgtaaagtattgaggattaagtgtgatttaaaaagataaaggattaaaaatcaattcaaagaaagagtaaagtagctttacaatattatttaagatagaagaagataaataaaaaggtggaattacttctctatataagagggatatgataaattataacatgttgttgataatgataattaatattaataataaccactattaaattgacatttccaatttatcagaagaaaaacacaagataatatagtttgagtataatgcgatccagcacagagcaacctgcccataaacgaacaataggaaatagagtttattctatttagcgctaaatgcttttcacacaagaaatcagcactgtaaacaatagacaacaatagttaataataaggaacaataggaaagcttcttttccaacttttcatagctctcttttacccgccttaattttagtttcaaattgtttcactttgtttcactttatttcactttatttcaattaaatttaaactttcccataataagcgacaaatccggtatatttgacatatagtgcgaatctttttcaaatcttgaattttgtttcttcaagcagaattagttttattgtctatttatgacggacaaattgtttagcttcactatatggtttgtattgtagagcttcggaaaaatcatatgagtttctattctcactggcattatcaactttgatgacgtcttattagtatcaatttcatcattattaacttttcaatttgacattatgcactgtttatcatcaatttctatcggatagtgccataattattcattatacctacacctcggggccaatgtcaaatacggtaaccccggtggggataggattactaaccggagttatcattttaggaaaggtaccgggcggtgtgttatagatttatatccccggttagctggaggctcaggtgaataagaggtcgatatatgactaatctagaattggacgtgaagtattggatattcggtatatgcagatagaggtatcttagtaattagagttttatagaacaaggttttatcactaatcaatatcctcagctcttattctgacagatagcctagagaatcttttcggtggaaaaccccgtcaatatgtgagatagatctattaatgtctcaaaaaaattctaaccatgcgttcagaattccaaagatttgatgattgttatggatccacaaatcataattcaaaaaattcaaacacataacaccaattttaaatataagaaactagtaattcgtcaacaatcggaagaattcaataacaaaatataatctgaaaataaatatggaaagatttaattaatgggacatgacttcaaccatcttccataaaagtgatatacggatttatcaattaaattatcttaattttgaacccttaaaatatccaaacataaaatttcccatgtaccaaattaataaacaacctaataaataaattttgttcatcccaccgatattattcaatgtattatttaaaactctactaataacatgaaatattaattcactgtaaatcatactcttatattgattactttgcccattattaaaacatatctcccattctaaacattcttcctttaatgcaggtaattgaccatattctgagcatttatttaaagtatattctcggaaacattgatctttttgaagctctagtctaacatttaatttatcatactcaatacgaaaatcttctcttattgtttgcaatacattatatccaataattaatataatagaataattaatactcttcttcaattgttcaaatatacttatattattcctataagatacttcatttttaatgtcatctgtattatactcatgatcatcatcatattcattcttattatgttcattatttgtaatcatttgataatttgaactattatacctcctggttataccatcaccagtattaatattgtaaaaatgattatgaataataatgtttttatcatcaaacttctttaaatcgtcctttcgtattatatctttatctccatttgatttaccatttattacttgacttaacgcgtacccttgtgattctggtgataaaatatttccaagattgaatttattattattattgttatcttcgttatcattttgctcttgtatttcatcatcaacacggtcattactgtctttatagtgcatactataatcctcatgttgattatgagtgggttcaatatcttcatcagtgtaatctctcatactaatatcatcatcttcatattcttcattgtctatagttattgatgttttactgtttgagtctaacgacagcttatacgctatatcactaataagttcattatctattatgtaattgctcattgattgtccaagactttatctaaagaaaagttattgattcagtgttaaaataccaaattgcagaatttctagtgaaattgaattatttttgccatttcattacgtaatttgggtggtattacccttttgagaaatctaaaaaaatttcatgttaatttttttttcttaaaacttgattttgataaaggaattttcagtggatagaaaagtatttcttattgcagactgatatcagacaatgggttctagtagaaaaaagaaggagaagaagaaggattttgttaaaccaaaattaaaggttggtaaaacacttgctaaaaatgctaatcatacatcaactgaatttaaagcaaaaaaaattaatgtttcatcatcaattaaacatttaataacaactaaaaatgactcttcaattgaatatattaagaaactttcagttttgaagaaaacaacaactaatttaacttcaagaaaggaaattttagctgaattcttaacaattttgcaaaaagatccaatgcaagaaactcataaagtaccgttagatgaattaattaaagttataagagttttattcttagatcaatcaaaaaaaatacgtactgatgcaagagaaattttatcacaattaattaaacatcataataatttaattgttttaaatcatgattcattaatgttattcattttcagtgcaatgacccatttaaagccaacaattagacaagattcaatttttacattaagagagattttaaatggtggtgagagattacgtagcttaactatatcaaatcattggatacgtgtttggaaaaatatgttagttttacttaattggaaaaaagaaaataaatcatatgttgattcaaatgattttaaagattttgatggtatgagattacaacaattaacatttttaaatgattttcttaattttggttgtattcaagaagaaacaaatgaagaagaagaagatgataattcaataattcaacagcatgatttattatcaacttatatgattaaaccaaatatgggtatgttatatcgtaatttaaaactttctggtaacataagtattattcaaactacaaataccaataataatgtagtatcaactgaaaaaagtgattttgatgatgacagtaatgatttagataatacaatgttatgtgaagatgttaatgataggattaaagttttcattgatggattttatgaatctattcataatggtttaaccgattttactaaagttgaagataaaaaattggtttcattagctgataatattttgaaaaatatcgataaagtaaaattaaagtatattgaaatacaggattagttagtgtctattttattagttttataaatgtgtttagaaaagaaattatgttattagttagtaacaggtttggaacttgattcttcaggtggcgcatctgagtcactatctgaatctgaacttgaatctgaatcactgctggaatctgaatctgaatcaatatcagaggaactagattcatcaactaaagtgtctttataatcaacaaattttaaatcttcaaaatttgatatattctctgttgtaatgtacaaagttgggaactcgatgacaactctatttgctaatgcatcagataataataaatcatgtgggaatgtaacaaatctattattttcaacatctttaaagaaaatattatattctgcaccttcagctatccaatctttcggtttaagctcatccagtgttgaagattctaatgatttatatctaacatatttttgtaaaactttcattttgttatcaaccattaaccattcaactgtccagaaccaatttttttgtttcctaccagatttattcattctccctctctccattccaaatggaagtttcttgactcgtacattttgtagaataatctcttgtttattattcaacttcttcctgttattgttattattactgttcgaatgagttggttttaaaattttcaactcagttttctgtcgtttggatagctctaaatttctattcatttttagtaaaaagttataatctctttgaacatcattttgatcaatttcatttttttttatataagtatctcttgttcctgatgaaacatcactcattccggaacatgatttttcaattttatgttttttgaaacatggtaatgaacatgtatgtaatttacatctcggacatacatatttatgttcgttttccaagcatatttcacacttccgtttcaccacttcgctcattcaataatggtgtaattgagcaaccttttgatttagataaaaacttaacaaaatttaaaacaaaatttccatgttaagagaaaatagattgaaaaaaaatatttttcacattacgtaatattataaaattgaatcaacgcgttggcaacagaagttgtctttatgtgtagattgaagtgttacaagctatcactgtttctttctgagaggaataaacaggattgaacagtagacatgtcactttgggcagataaatatagacctaatactctagaaaaactttcatatcatgatgaagtcactgaacaattaacacaactagcagatgctggttctaatttcccacatttattagtttatggaccatcaggtgcaggtaaaaagactagaattatgtcaatgttacgtcgactatataatacaacatcaattgataatttaaaagttgatgttaaaacatttacaacagcatccaatcgtaaattagaattcaatgttatttcaagttcatgtcatattgaaattacaccaagtgatatgggtaataatgatagagttgttatccaagatttacttaaagaaattggacaaactgaggcacttgatttttcaggtttatttcatttagctaagaaaggtactgatgaaattacaaatgataatataccacaaaagaaatttaaagttgttattattaatgaaagtgaaaaattaagtagggatgcacaagctgcattaagaagaacaatggaaaaatttagtagtacaattagattaattttgatgtgtgatagtacatccaatattattgatccaattaaatcacgtacattaggtattagaattggattaccagataatgaatcaatgaaacaaatatttgaaaatatactaaataatgaaaatgatgcaaagaaaatatatccagaagattgggatgatagatgtattgtttatgatcatataattgaagaaagtgataataatttaagattaggtataatgatgttagaggcaatgtatatgaataatgattcaatttcaattactacacctgttataaaacctgattggatttcagttattgaaagtttaacaaaaggtataataaaggaacgttcagttgcaaaattaagtcaatgtagaactattttatatgaattacttgcacatgcaattcctggtaaattaatacttgaaagaatgacatttaattttattaaaatgattgatgattatagttcaataaagaaaagtgatgaagttaagactagtattgtcaatgcagcatcattatttgatgaaagattaacacttggtagtaaagatatattccatttagaaggttttgttacaaaagttatggttattttagaaactgatatcagtagttattaatgatattattaacatataccaataatctatgtacagtaatttttagagcattatatataactaactaattaaacatataattataagaaaatctatttacgacctgtgaatttagcatattcatcagtttttgattttaataaattagcaaattttttagttggttcttccttgattttttcaagataattaattttttcagtttcttcaacgtaaccaaaaccggctcttattggagtatctttatcaataaattcccaaataccaggtaatttttcacaagctcttctaagagtatcctttgcagcatgacgatgcataccatcaacttcaaaggcaattttaccagttggaactcttgcagcccaatgatcaaatggacctttacccttacccatacgtgttgcattacctttaatacaaattgcaatatttgtacaaagtcttttccataaagtaccattatgctttttaacaaatctaacaaggacattatcagctgcatgtaattgagctgcagttattcttaaaccttcactcttaagacgcacaccataagtaccaaattgtaatgtattacccttagttgaaccaccagtacgaactgtgactctacccttttgctttttcattaattgtttatatcttggagctaattcatgaccaaatctctttgcagatggttgtgcaacttttttcaatgaagaaaaagctgtagatggtgaaaatattttcgatatagaactaaacatattggtccttgtatagtttagaaaatatagctaattttgtttcttcttcttattctcctcttatatttaacatgaaatttaacatgaatcgatttaaagattcatgttgagagattggaaaatttatgaaattttaaatatttttatactgtgtacgggtgtacggttatttatggatcacgtgacaagatttttgagtccggctgagccaatgttgaggtaatgcttattaaaactatctccctttaccagtagaaagagtttgaccattttatgtatgttttaagtttggagctatagataacagtttacaactgccagtgtattctttttgcacatccttaatattctataaagcactactttgcttgttagcttaaagtgttgagccacttgaaaaatgctgcgtcgataagactatcatgaaatttatcatctcataataacatgaatggatgcaattggatcagtttaactgaagaatagccagtttgatattttaagatatatccttagcttattactcagcttacagtccagcttgcggaaaatgtcttttacctgtgtaagtgtaaggaaatcatttattccaattggaaaatgtatttcaaatcgtgcattttcaacttcccatattcaacgacaatcacaaaaagattcactcaatgttttaggaacaacatatgaaagtgatgaatggacgaatgcaactccaagaattctctccttagttggtagagatttacataaaaatccaaatcatcctattggtattttacgttcattaattgaaaatagatttcaaggtttaggttatacaatgtatggtgatttaaaaccaaatgtttcagttaaggaaaatttcgatgttttaggtttccctgctgatcatgttggtcgttctaaaagtgatacttattatttaaataaagatcatttattacgtactcatacatctgctcatgaacatgaatgttttataagttgtcaaactcctggttattttatttgtggtgatgtttatagaagagatgaaatagatagaactcattatcctgttttccatcaaatggaaggtgcaagagtttggaaaagagatgattttaaaaatgaagaagaattattagctaaaattcaatcagacattgatgcaattccaaaaactgatttaattgttgaagatgttggttatgatccaatcgaaaatccaaaacaagattttatgacaacaaaggaagttgatttagtttctcaacatttaaaacgtacaattgaagttttagttgatgttgtctttaatgaagctaaaaaagcagctaaattagctggttcaactgaagaatatttaaatgaacctttaaaaattagatgggttgaagcttatttcccttggactgcaccttcttgggagattgaagtttggtggaaaggtgaatggttagaatgttgtggttgtggtaatgttagaaaattagttttagataattcaaatcttgataattcaattgcttgggcttttggtattggtttagatagaatcgcaatgttattatttggtattcctgatattagattattttggtcattagatgaacgattcctttcacaatttaaacaaaatcaaatctcaatttttaaaccttactctaaatatcctggttcagttagagatatatcattctggttaccacaaaatgatgatggtaattttttaaaacttcatgaaaatgatttaatggaaatcgttcgtgaaaattcaggggatttggttgaaagtgttaaattagtcgatgagtttgttcatccaaaaactggtaaacattctcaaacttatcgtgtcaatttccaatcaatggatcgtaatataactaatgaagaagttaatgttatgaatgataaaactagagatgaacttgtcgctaaatttggtgttcaattgcgttaaatgtcttatttgtatgctgttgtataatgtgtcatgttttaagtaatagatcttgtaaatattttaaaaaattataaaatcaaattagtttacctaattaggcatctcaatcctcaacatgaaattttgggaaagctgcatttttcaatcttagtaatcgggatttgcattattcatcaaaagctatacagtttgtttcttccaggttgtttctttagtagagaaagatatattggcgaatgacaggtcacgatataatcattatatacggttccgaaactggtactgcccaagattttgcatatacgttagcacatagatgtcgatatttaagtttgaatccattagtatgttcaatggattctcttgatcctaaattactgttagaagtttccacattattgttattatgttcaactacaggtcaaggtgaactaccaagacattctagaaaattttttaagttcttgatgagaaagaacttaccaagtaatttacttgaacatttacgtttctctacgtgtggttttggtgattcctcttatgtcatgtataatttagctgcaagaaaatttcacgcacgtttaaaacagctaggtgctttggaattatgtgagagagtcgaatgtgatgaacagtcatctgaaggtcaagaagcgttttatggtgtttgggaaaatttggtctttgaatcattgaagaataaatactctgataaaattattgaaatacctgaaaatgttgttctggatccaatccataaagttaatataagaaaggatttatttaaaagagatattagtgcagtgaaatcgattgatagatcaggttcgaatgcagacttaattactgttgatgttggtaaaattgatagaataacggatccagagcattttcaagaagttttgcacatcgtgctagataaaccaactaaatctttggactatagagttggtgatacattgtcattataccctgaaaatgactcacacgatgttgactctttcattaatttacaagaatggaatgacattgcagattatccattaaatctccaatgtcctgttcatatggaacccgaaggaggatgggtgaggaatctaacattgagatctttggttaaatatcatttagatattaccgcatgtcctcctagatcatttttcagtatggtatggcattttgcatcagatgatcgtgaaaaggaaaaattacaagagttaggtaagattgaagaatctgaacaactatataattatgttaatagaccacacagatcgattctagaagttatccaagagtttttctcattaaagattccagttgaacaaatacttgaagtcataccattgatcaaacctagattatttagtatctgtaatctaccaactcctgacaaggttgaattgacagttgctgttgttgagtatagtaccattattcgtaagttgagaaagggtctatgcacaagctggttgaagagatgtataactggtgataaaatgattatatcaatcaattctaataacttgaaaattttagattcaaatatgatattggtaggtcctggaactggtatagctcctgttagggcaattattcaacataatgataaacttattagagaaaatggtaaaggtaatgaatatttattatttacaggacatagatatagaagcaaagattatctatttggtgacgaatggccgcaaatgaaaggtttgaaggtgatagatagtttttcaagagaagggggtggatatgttcaagacaccatctggaaaaataaggaaatagtagcagatatcttgaacaatggtggtggattgtatttatgtggaagttctggtaaaatgcctacacaaaccagaattacgattgaggaaatattgaaagaatctaataattgggatgatcaaactacaaaagatgttatgttgaaaatggaaaaggagagaagatatattcaagagacatggtagttagagaagtgttttgtttaaaaattatgtgtaacattattcttaaaaaaaaacttattaattacattactttattagtgtatcagtgatctatttatatatttattgtacaaaggttactggatgctatcttgatgtttgaaattgatcccaatgatttattcatctgattcatcaagactgtgttcctcttcattctcttcttctgaatcttcgtcgtcgtaatattcatcatcttcaggcccaggaacatcaatcacaagaatatttttctcctcagaattatagccttcttcttctgattcttcatcctcttcatcttctgagtcagaatcgttatgtttttgatttgggttacccatagcccaaacatcaacttctcctttaagtttctttctttcttccctttccttatcaatcatttctagaaaagctttttcagcatccaaaacactttgagaatctgtacattcagcatacatttctaataattccttattgatatccaaaaatgttggaccccaagaaaagttttctaataattctaaagcccaatcttgatgaccgacaatagctaaacatgcagcaactgcttcaacacagttcaatttcatcggacgtccatagttaactggattagcagccacaaaataaggtaataatctttcatatttaccaccaattttaccaaatggaacttcctctaatctagcccaggaacattcaacaacagcaacaccaaattgttcaacaatttctttatcatcaggacaaacgacacctttaccattgggagtgacaataataccttgaaatttttgtcctattcttaaacttttgatcaaacctaatctttcaagtttcttcccactacatctctttggatcacagtgatcgaaatcccacatagcaagttttgtagggaatttagtttgtcgtaaaactgaagagtattttgtctcttgtctaccctttccatgatgggtacgattatggtgaccatttgaagttttgttaccacgttttggttcgtctctttccttatttttacctttacccattattgtctttacgaaatgtcttgtatatatccagtggaaacaggttaatgtcaaagtcaataaaagttgaatcaactgaaaaatattttttgaccttctcagttaatggggaaaatatccatgggataatcgagctcttacactaattttcccagtaaaaattttctacttcccatcaaaccgcatctccggttcctactaaagttttcggaacatgaattttctattattggatcaatataaaaaaggctgggacatatagtattattatattttggaattcttttttcatttttccaatttccagttaatggccaacgtggagatggcaattcaacactcagatatgagtccaatgctagatacgactaactcattgaagtttcagtcaagaaagcctaaaaaaatatctgcttggttatcgaatccttttataaactatattttcaacaatcaagatttcaaaagatcaggtccattaaaggaaatcataattcaactgtgtgagaatccttccgattatgcaatattggtaccatctacaatctttttaatgacccatgcagatgctcaaactaaaaaaccttattccgagatgtgcaaagatttagaatttatcctatcacatattgtacgactggatgtatctcgtgatcaaagaatacgaacgcataaagagtttacaacattgaataataaagttctttcaataaaagctgatagcattaaatcagtaagaaatttcaaatattcagtagatgttaccattttacgacaagaatttatacgaggatttgcaaattatattccccttggtacgtgttttcatctcattcacatatcagaaagcattttaacaaactatgaatatataggaatagcgcaagatctgttaacaacgatgaatgttatcaatggctctactaataactcattgtcacctacacatacaactaaatcgcatatacaatttgttgatttgatggataaatatgcagaattgaaagagctcgataagaaatttggaactttgtttgaagaatacaattttaaaaagtgcaaagcgataacggatcttgatcaatcatttagtgtgataatgaaaagaggatctgctatgtttaacacattacaggcagaaacttttacaaatctcttgaatgtatattccgaaaatgaactaacagaaatgatctataattatcttgaggagaacatatatccaaaattttgggctaaatttgtaaagttgtcacctcacgattatgatgaaaaactggtactagcatatgaaaacttgaaatggctcagtataactgaagttggattacctgataaagtggtcagtgatataccattacttatgaaatacacagaaaagtgttaaattagcaattgctgaatttaaaaaaattttaccggcaccaaatagcaaccagaaatgtctctgtttgattaatacaattgaaattctatctgctgggagtacaattgatgctgatactttgataactttattgatttttgttatttgcttatcaaaagttaataatctgaattgtattctaaattatatacaaaagtattcttatgccgaaacaaacatagaatcaggaatgttgggatatgcgatctcatccttagaagttgcaataaaatactttcatgatgactataatatggatggaataattgcaaaatccttgcagaatgaagttttatggagacttattgggtcagttagtagtgatttatcattaaagggtaacaaagaggatgacgagaaaacttttgaacaaattgaaaagttattgaagcctttaaatgaaccaaataatatacccctggatagttttgttaaatctagatctttaaatggtgaatcatgcattatgtttgcgttgaaacaacataatgaagaattgatgaaggttttgcttcaatttgattatatttttacattagatgatattttagaagatcaagatatcgaaggatcaaatttattgtctgtggcacttgatatggaacatcccattgcagatactttagcaatgatcatcaaagaagcaactgatggtgaaattatgcaatatatcaataaagcagatatcaatgaaagaacagttggacatttcatgtgcaattctttccatttgattaaatattttggaatgtttattaactgggctaaaaaagatacttttggaaatacaccatttatgatatatacccgtcgttacgatcatcctaattatttagagatgatgaagtcaacaatcaaaacagttgaaaaatggtatcagagaaacaatagagttttcagttacacggaacatgtcgataataaaggtaattcaattatgcatgctatcagagatcctacaattttagaattatttttgaaaacgtttgaattgctagaattaaattgtttgaatgatgctaatcaaagtgcaatcacattagctattagatacaatagaatagaaaatgttgagatattaatgaaagatgaaagaacttgtatgagtatagttgatcctgtatcgttcatgagtgctctggattatgttaaactagaacgttgggatgaatgtgttaatagagaaattgccaaaactttggaagttcaatttattgaaactgagtatggtgaaactctgaatattgcatgtgtgagggccagatttgaacctgcgcatggattatgttgttattttagggttgtcaataatgaaggatgtagtgatattatattggtaccatttgaatgtgtggtgaaagtactaaagttattaaaacaagaaaattcatgtataccatttgatttttccaaacctgatttatggttcccaaggcattcgtctgttagtatgaaaggtaatataagttcatcaaataaaatgaaaatcaattcattgattaacaatttaaacttaatgattcaagctctgatgaaaaatggtacattaaaatacacacattcacttcaaaattatttacttgttccacaaactccctttgaattagaagttaaaataattgatgaaaaggaaattttgaaaaatatctatcaggagaatttcagccatagaaaagaaatactttttagtcagtcaaagttcaagtcaactattattcgatgtgaagatataattgcatttgatgcattcttagattatactattgaagaactggataagtttgggaaatgctattccaaattttatagaacattaacattgagtgatgtggaagctaaagatttagataaacttcgtactgatataccatggatagttacagatgctttgaaatttagagaatgtagggtagaagattcttgtgatatatttcttgataaattgagacttttgtttgcaacagtgcaagaattgataaaatcatcaagagaattgaaaattaccaaagttagaagatggaagaaattaagagttgatttaaaaacactaagaagtgaacttgatagagttgcaggtggtggtgttgatggatcacagtcaccaactgcctataatggacctgctgatgctagcattaaaaataatagaaatcatatattgtccaaagtattcaaacaaattgatattgtcactggtgaatgtcttgaaaatgatgatataaatgaatttagaaaagatattattaaggtactcatgaaaggaaagtatgatggccagaatgaaaattttggtgtagaaagtttagacatcaaagatgaggcagtaagtaaggataatgaagaaaaatcattaactgagatgattaacttagaagattttggaatcagcacatggtttgttgaaaaaagaagaatagcatatgttaaaagattgttagaaacgtttttaaagtacagaattgaaatttttgaacttgatattgaattaagaaaaaaatatgaaagtttagcaacatttgtaagtaaattttatcaatttagaattgatttgttcaaaaatgcatataaatgttatgcaatgggtaaaattggggaattaaaacgtgaagtacaagcatgggaattaggtttacgtgaacatcaattaaagggaatgtcaaaaatttaataaaagattatttatttcatagatattatttatttatatagtaatttatagagaaagaaaaaaaggaagaaaagtaattataaattttaaagttaatttcctgaattgttgttaccacccataaagtttttagccatattttgtaacattggattacttgctaaaccatctaaattatctgcatcaatacccattgagctagccatttgtttaacttgaggattattcattaaattacttaaagcatttggatcttgcatcatttgagctgcagcttgcataatttgaggattattcattaaacctgctaaaccacctaaaccaccagattcaccaccacccatcatgttagcaaatgcagagaaatcaggtaaaccagttgaagctgaacttgcagcgccatcagcacctacaccagcagttgcagcaacaggagttggtaaatcagaaccatcagattcgccattcattgctttatttaaagaattcattaaattatcaccaactttcttctttgcagtttcataacctctcttcattgcatcagttggatttgaaccttcaacttgtaaacctttttcataagcttttaaagcttcttcagtattacccaatgcataattagcaagacctaatcttgaccaacctttagcataagttggttcagcttcagttgctctctttgcatcttctaatgcaagatcatgtttacgagcagatgaataagcagcagctctatttgataaataaacggcattagttggaattaattcaattgctgcagtatatttagcaatagcagtatcataatctttacctgccattgctttattaccttcaagttttaaagcttcagccttttcctttgttgcttcatcactttgatcaatatgtacaggaacttcattttctgatttagctggagtagaatctgaatttgaaacggttgataagagttgatctaatgatttattatcataatttgccttaactgcattaatctttgatgaatcaagtttataagattcagttataccttcaatggcaaattcaattgaatctctgttatcttctggaatatcaccattttgaatagctttttgtaaaaagtcaacaataagggatgcagtatcttgtttagaagccattgtatgtttagtaaagggtttctaaaacgtgtagttacttctataattctctacacttatacgaacacccaccggtgaagattttaaagtgccatcgtgtcaccaccaaactgctcagagaaatttcatgcagagtgcgcgaaacttttttttttcttttttttcagttggtcttctcgaaggttctgacttatttattatagggagttggctcagctggttttaataattatgatgcttttcttatcttttcttatctcatcttatcttatacacagtttgttcttttaatacagatattgtggtaagtataaactctgtacagaaattcattggattgcaaaaggttatgagtcaaattttgacattattttcacaggggagtatcgcaaagtcggtctgctgcccattggatttgtgttacagtcgtgaataagaagcaaaaagattgctatcactaaagcattgactaagtggatacttagtattagggaaatattcttcacactctaagattatcttacaattaattttattaagatcttttatatgaattacttttagtatttttcaagtagctctccattgtttaacagtgacattaccatctttaaagttatcaccaattctgacttctttactaccagcaatcaagttaatgttgataaacctactggaccttggagtacacaccaaagaaattgtctactcaatagattctactccaaactataaagctcagtatatcagatatgtgtttgatattgctagtattattgtttttacttattttataattctaattaattaagtatttttctatgaacgttatcttgatgtaataactatacgtttataacattttgaagcatttcaataactaataaatatgcctatccttaataattttcaaaaatttgaaacatcttgtataaaaaaatattcctttgacttctaaaatattttagattttcaaattgtagcaattaacataatatgtcaatcaccactactaccaggcacaattttaaaataaaatacccaacttaaagcatattaccaaaggattaacggtcaatttcaaataaaacacaacaatttctatgtcatatagaaatagactaagcgaaagataagataatgaaaattcaacatgaattcaaagaacaagcttactttcagtttttctgttctctttcatcatctctctagccatcatttgactgatataccaccagataaaacatggatttttattcatcattaaattcaagtcaattagatgttaaaaaaccaacaatttttgaaattgcatcatgttcacaacttgattcattaataactccatctataagatttttacttgcacattatacacatcaatatcctagagttttaatccgtattttaaataattttgatgaattaaatttattaggtagaggaattgttgaatataattatttaaatacttggaattctacatttattgagaaattttatggtattaaacgttgttcatctaaaccaataattccatcatcatcagattttgatggagattcattaaaatttaatgaagtttcaacactttcaagagctcaaatattatcatcattgttagatactgttggtttaccatatttggatacaaaattacaactatatcatgaaaaacttgtcccgatatatttaatgaaccaaaatactgttaacataccacaagaggaacaatcaaattcagcaaaagatgctaaatctagattaccagttaggattttatcaatattatgcaaattgaaaactttaatacgaaatttattttttaaatattatccaattgctaaaatgtcattaaaattgattagtttattcatatacataatgtatttatcaaacaaaacatcatcagcatcaattattcaatacttatccaaaatatcatattcacgtttaacaaatgctgatcatcaaagagttgaatcaataataacaccaaagaaaataattaaatttgaatcaaatgttccacaaacatttacatcaatagttttatcaaatattaaatcattaataaatccacttgaaaaaatagcttggtcaacaactgatacaattttaccagcatcaatatttcttcttagatttttagaatggtataatgctaatagaaatcctgatgatgataatgattcattaaagaaatttacaataccaccagcacctaaaattgcaaaatctaaatttgatgaagaatttgatgaagagaataaacatcatgattcatcaatttgtagaatttgtaatcaaaagttgcataatccaggtgctattgaaacaggttatgttttctgttataaatgtatttatgaatatttaagagatcaatctaaggaagaaggaggtgtttgtccagttaccgggaggaaattattaggttgttcatggagtgaaattaggaatgaatggaatgttactaatttaaggaaagttattctttgaaataagatgggaaattatttatattaagtattatatatattaatgcaagaatgtgtgtttatataataaaagtgtagaactgaaaaatttataagaattaccataaaaaaaagcgtacaaaaccgtaaaatatttgtgaaatgattgattgaagttgtctttaacttttatcaatcagtttcatcattgacactatcatcatcatcatcatcatcattacttgcccattcaacatataaattctcaacagagacacgagattttttcaatagtaaaggatcaaatggaaaaaatgcaatcaaatctaaaaattcttgagttgcacgcattgaagattgtgtagtaccaactgatgacattgaacttgcagttgaagttctatcattggtattttcatcgattgaactaccattattattattattattagtatcattattattagtattatttgaagatgtgttgttaactctaccaactctttctcttctgattctttcaataacactccaagtataacaaataccttcagattgagcaacacgactgaaaattaatacaacagtttcattacaccatcttaaaggatcatattttgatattataactctagtgaaaaatttatctaatgaagcaacccaaccagttttattatcaatttcattaatattagtattatttaaatttaagtttgatttttccttatttaatgaatttttacggaaacatattatgtacattaaagcttgaattaaactgtagaataatgcatgtttagcaggattaaacttttttctttcattattcccactattcgatcttgaatgataatgaattggtattattattgttattattttcattattttcatcatcatcgtcatcatcagtcactatgttcttccatataagctgtacaataatctactaaaaatgtaacaactgaagcaatttgcatatcagataccattttagcacgagcaacaaaacctgcaatgtattgcataccaataactttattatttaaatttatatttattctatcagatgaatttcttggagaatctgaacttatattaccatgtattgaaaacaatttcaaataaagcaactaagaaagcatcaattaattcaggttgttgttgagaagcataaaaaataatatattgagttgcctttgtaccatgagttggtataacaatattacgaaaagaatttattaatgcattaaagattggtatcccatgacccgattccaatgattcaactgataattttggttttaaatattctaaaatatatgataatagattatcaattttagctgataattctgataatgattcaagttcgattgtataatctgcttcattatctaacatttcatcatcaaactgttcatcatctgaatgtataatgttgtctacaatgttctttttatcattatcttcttcttttcttcatcatccaaacctgcaaattttacttgttttattactttaacctttttaattttattgactttttcagcatcttcattatctgaagtctattatgtgatcttcaactgtgtctattggattttcatcattatcatcatcatcatccatatcttgatcatcttcgtcatcgctttgatcgtgatcatctatatcactcagatccatcttcaccatcctccttcatcgtcatcatcttcctcttctatacctaaaacttccgataaatcatcatcatcaatttcatcaatttgattttggaattctacatctaatttaacaaaattttcaataattaaattccatatatgatttgttaaaacattgtaataatctgaaacatataaaatattttgaacatagaaaacatgatcttcctttggagaatttttattaggataatgagatttcagtaattttggtaaataatttgaagaagttggagctaaagaaattaatcttttcaaagtatcatgatgagaggataaagttttcggatctgatttattaaaatctaatataattttagttgcaacttgattccaccaagaaggtattgttgaaacaagtattactaaaaaagttgcataatgtttattaaaatgagaatgttgacttgaatgatagatccaatttaattttaagattgaatttataagtggtaaagcatttcttgaatcaaaacgagcaatttcagaagttaattgagatataagtaatgataaattttgtgaattaattgctttaatattatttgaaggtaatgaaattgtatttgcaagtgcctctattggtgaatcatcataaattgaactatttgaagaatttgattttgaatcattattttgatctaatgaagcaatagcagatttagctaattgtataatcatctttgaactaaaagatgaattagaagatgatgaattgggagaagatagtttaattctctttgaatttgaattagaattagaatctccccgttcatcatcctgcgatctcttttccgcaggagtagtggaaagtacggtcatcatctacaatacaatacggacggggcgccaaataggggacagaccaactgagataaaaagggatatacctctagagattaaaaagatcaatagatgtcattcagataaagaatattggtactataactgtggtttcctttaataagagagtgaaaaatttaaaatttttttttaattttttaattttttaattttttaattttttattttccatcggaaattttagctttttatcctaaatttgcttaattttccgagagagcatttggtcctgtttctttactattgtcgataatttacaaattacagtgatgatggtttccatttattaatctggagtatattatcgttaattgattatatcaattagtgtattagatataaccacttataaaatcatatatttactgtcacaatgaatactatatcgccaccaaataataccatatcaactacatcactagtcaatgatcaacgcacggcccttaatgttatacgagaattccttaaatctaaaacttcctttgatgtcttaccagtctcttatcgtttgatagtcttagatacttcattattagttaaaagagctttaaatgttttacttcaaaattcaattgtctctgctcctctttggaattcaaaaatttctaaatttgcaggtcttttaactgcttcagattttcttaatataattcattatgctgcaactaatcctgatcaatcacttaatttatcagaaactttaacattagatggattagctaatattggttcaatgtcaggttcatctgctttggatacttgttcaattcatccttttagatcactttatgatgcttgtcttgaaatgattaaatcatctgctagaagaatacctttaattgatagagatgaagaaactcaaagagagaatagtcgtttcagttctaactcaatatcgtatcttaaaattcgttagtatgaattgtcgtgaaactagatatcttttacaacctctaagtgaacttaaatattggcacaaataataatttatgtcatgcaagattaaatacttcaattggtgaagtaattaatctattgattcaatatcatataagttcagtacctatattagatgatgatgataaattaataaatgtttatgaagctgtggatttattatcattagttaaaggtggtgtatacgcagatttatcattaactgttggtgaagctttattgaaaagaagtgatgattttgaaggggtttatacttgtacattatcagattcattatttgttgtacttgaaacaataagaaaaagtagattacatagacttttcgttcttgataatgagggtaaattattaggtgttatgacattgggtgatattctcaaatatatcctatgtagtgatcaaccataatttctctctttactaatgtataatgtataatgtgtagtatataccaactgttcatcctatcaacatgaattggccaacttctctctccagcggtcgaactataaacttacccaatatggcaatgataagcgatattttttttttcaaccttaatagtcttaacaccagggaatggattactaatctttttatcgatttctgaattttgtcacttattattctttctttcattacgtctgccccgctgataatcaattgaactagaagaattatttcagttcatataagacacatttaaatacctaaaaagctttcttaaaaataagcttattaattagaaattcatcaattggaatcattatcatttttaatatatcaaaaaaatgtcatcacttggttcatttacatcaaccttcaacaactcaaagaaaagcgctcaagttacattaagaggaacaattgttggtcttctaatagggactttgattttattatctaatttccaatttggtttacaaacaggttgggtttcaatgatgtccttacctgcagctttattagcgtattcattatttaaaattttcaataatttcatacctttgaaaactccattcacaccacaagaaaatgtttatgtacagagtgtggcagttgcagttgcaacaggtccattagcttatggatttattggtattattccagctattgaaaaattgttaactccggaagaagctggtattcttcaaaatgatttttcaagtttaaataatacatttaatgaattagaggaagttgtatttcaaccttttaaaccttggtggaaattaattatttggggtacaggattagctttctttggtgttttctttgcaataccacttagagaagaatttattattagacaaaatttaaagtttccaagtggtagtgcaactgcaactctgattagcgtgtttcatgattttcctttgagattaattggaagaccttctaccaaggatactttgattaataataatactaataacattgacaatggaaatgataccactaaatcaagtattcactcactttcaatagaaggaaagagaaattatacgtttaggaatggatgttataaccaaccctaattcaattaatgacaataacagtgataatgattcactcctacatcaatcaacaactagatcaatttctgaagaattcttagatatggaatatatgggtaaagaatcatattcaagagatatgatattattatcatttacagcattaatttcatcaatttatacattgactacatattttataccacaaattagaacaattccaatatttgggaattatttatcaaatgaatatttaataaattttacaccatcacctgcttatgttggtcaaggtattataatgggatttcaaacaacttgtggtatgattattggtatgattatcggttggtttatattatcaccaattgctaaatggaaaggttgggcacctggtgaaactggtgattggaaagatggttcagaaggttggattatgtggattagtttatcaataatgattgcagattcaattgtttcattaggtttaataacttataactcattgaattcaattatgaaatcatcaaactcttccaatttaaataaaagttctggtgaatcttcaaatcttttaccaaatgaagcaactttagatgataatcactcttattcaagtacagaaaataatgttgaaaataataatgataacaatactgataatgttcaagatatcacttgattttactaatgatgaaaacattaatgatttgaaatatggaaatgatgaaaatgaagagtcaatccctgcttcaatacccactatcggattaatgttatgttgtccattattaattatttcaatgaaaattatatttggatccattatacctccgtggatattattattaactataccagtttcattagttttatcattaattggtgttaaatcattaggtgaaactgatcttaatccagtttcaggtatcggtaaattatcccaattattaactgcattagttataccatcatcaagacctggagcagttttaatcaatttagttgttggtgcattatctgaggcaacagctcaacaagcaggtgatttaatgcaagatttgaaaactggatttttattacatggatcacctcaagcacaattcatgggacaaatatttggtagtatttgggggattttaattgcagctccaatgtatagatggtatgataaaatttatcaaattcctggtccaatttataaaataccaacagctgttatttggattgattgtgctagattagttaatggtcatcaattacctaaaaatgttgataaatttgtcttattatttggtattatattcttcatcctttcattaatacgtggaattaataaagatagaacaaataaatatactaaatatactaatttaattccaagtggtgttgctgttggtataggtatttataatacaccttcatttacattagctagatttgttggtggtattataagtttaatttggatgaataaaataaagaataaacacgtaaataaagatgatagtcatgtcagtttgattatctttagtagtggattggttttaggtgaaggtttattcagtgttgttaatatgattttagcaagttgtaatgttccacatctataattatgtctctacagtttttttatactattatattagttaacttattctactattttctcttgtctctcatttagttatctcagtgaaatttatttgagatccatgaatggaatgtaaggttctataatacattaacttgaaataaaagcagtaaaagcatgaaatttaaaaagaaaaagtgaaatgaaagtaatttttcttttcttgttaaagcatcaaagcagagaaaataggataaaagtagttcaaaataagatagaaaaagatataataagtagataggtgaaaattatcaaagatactaatatagaaaaagaaagataaataattctaaaaagatttatgacaaagataagggtaaactccaaaaattataataaatgccactttttttttcagaaaaaagataaaaaatagaaaaacaattgtcaattcaatttgtgttttataatcttgctttctttttgattatcaattatcaatatcttgaaatttaattaatcccattagcatccctttgctttctttgtttttcattttcaattttattattgatcaaaacaattgcattttgaataccataaatattaccaattaaagttaattttctttctggtgcaccaggaaatttcatcattaactttaacataacaaccagtattttgtctgatatcttttaaatttttaccaccacgaccaatcactaaaccgatatgagtttgtgaaacatataattcttgattaactttaccatcagcagttgtaattgtttcaccaggtctagaattagtatttgcagttggtgaaattaaatttgtttgattattcatcatacccatattcataccattgtttggtactccattaaattgcatttgaggattcataattttcatttgatttggattatacattactggcatcatcatattattttgaccttgattattataaccaaatctttgattattagccatattattttgattcattgataatgcaggtactgaaggttgattatgatttgcaggattataatatattgattttgtaatttgttgtttatgttcaataacagtttgtgcaacataataagttgcaatatgaattgcatctgcaacaccactaatatttaaaattctatcagttgaagctggtaaaatttgatcatttgcctttaatgaagcagcagaattttcttcaatttctctaaatctagcaccttttttaccaataatatatcccataattgtatgagggaataataaacgtaaattataaggttttgaatcaatatttgaagattgtccaaaaggttcattattaatagttctaacaatcagaccaaaagcttttgcaacatactcggcggatccacgtacactgataactctttcagggacaccttttaaattttcactaacatttacacgagcatttgattcttccttgattttagaaattgattcaccacctttaccaactatattagcagtatcagaaactgatgcaagcatacggaaatgaacatacgttggatcatcattttgtacaactttatgtgaagagattggtccatattcattggcagtattattagcaaagtcatccttagatggaattgaacttggtgttacattattgttgttattattagtattattatgattgacattttcgtcattattatcactggtatcattactattattattattattgtcatcatcatccccttgattattattgatatttgtattatttgagacatcattatcttgatttggtgatcgatctttcataacttgatcattactatcagcattatcattattagttaaagatactgaagttttctccttgtcatcttgaatatccttctgttctacagcctctgcatctaatgccacccttttaggaacatgtgtagtattttttgattcctcggattcttcgttctttcttttcaacatgatataacaatattctatgtgttatccaatagtactgtacaagatggactcaattgagagaagacagtattaaacacaatgtattcaaagcaacaaattgcagttatccaactcttccaaagttgtctttccacttacaatgcttttttctactgttttttttcaccagagccctcgcgagagagcaataacgggttttagaaatttttactatgtgatattggtgaagaagcttttttttcgtacttcctctggtggagtcagtggcgtacatcccaacacgcttttatctttatttgattacacgtcttggtgaacagcgatggactcggcaaagatacaggacgttgctgatgtgcagcagaatgcacacaaaaagtttgaaactggtacggtttcagataagggagataatgaggtttcaaaaattgatggaaatggcgatgaagatgaagatgatgatgggtataatgaggatgaagatgaagattatgagggtgataaaattgagaatggtatagatgtggagaatggtgaaaagaaaagcgaagataatgaagaggaagaagatgatgaagagtatattgtcgaagaagatcggaaagaactagctaaatatagtactattgaatctagtgaaggcggtttaattaaaacaagaaaacagagacaacaggaagaggaagaagctaagaagagaaagaaagatctgtcatctaagaataatggcgattcaagtaaatccagtttgaatattgattctatatgggcagaattaaataaaccatcatcatcaccatcaactacaactgctgcaccaaatacaacatcatcaccatctaattctatatctcctataaatgagacatctaaaaacactaatgaaccagaaaagattaaaattaaaagttcgtatgaatttgctggtaagacaataacagaggaaaaattagttgatgttaattctgaggaagctaaagcttatttgaattcttctaaacttacacccaagttaggatcatcagcttcagaaactggaaaagaatcaacaattaaacccaaaacaccacttttgaaaaggagaagaaaaagggaaagtttattagatgcagttatttcaaattcttctaaaacaaaattatcaactttagagaaatctagattagattgggcaacatatgtggataaaaataaaattagtgatgaattaaaatataccaataaagatggttatttagagaaacaagattttcttaatagagtggattctcgtagagataatatttataaagatgcaaagacaaagacatcaaaaaactaaaatattatttgtcaaagacattcaatgattgatacctgtatattatttgtaattacgatacttctatgttttaatattattatgaattattataaattggtattaaataccatttacagttatatgtacatgtaattctattattgtttattaattctctttgaattaaaccaattgattaaatcaatgaaaagtgttgaacttattttattgttcttattaattgcccatttaaccatttcagtttgataaacatttgttattttagttaaataatcttcatattttccattatcatcaattttatttaaaattgatctaataatataaattgatacttgactacatgcattattcaaatgcattgaattttgattttgatgcacgttccaatacttgccttataagatcaattaaatgatcaatttcaatttctttatcagtttcttcatcatcattttcaccaatactaaatggatgtttacaaatctttttaattaatttatgtgccttttcaccaactttgatatctaatgttaaattcattaaatcaagatttgttaatgcaattgaaataacttcaaaatttgttgaatttatattaacataaatttctaataaatctaaaattctcaatttacagagagacattaaatctcttgcttcttttgcttcaagtttacgttcattaccatttttagatgatgattttaattcatttaatgaattttgacgttgttggaaaattgctgataattgattatcaattgccatcatttgttcatctgacattgattcaactgaggaatctgattccataccttcatcgtcatcatgatcatcatcatgatcatcatcgtcatcttcatcatcatcggaactggcatcaacatttttattagtatcatcagcagatgattctgcaacattcaaagctttagcaagtgcagaagttgcagatttttcaacttcttcaattttagaattttcatcagattcttcaccatcattatcttcctcttcttccccctcccctcctcctcatcatcatcttcttcttcactatcttcagataattttttctcatcatcctcttcatcaccttcttcatcataaccatcaacttcttgattaaataattcttccataccttttttattttcctttgttaataaaacatcaaataatctatccaattgttcttgcttaatttcatgaacaatacattcccaaatattattaccaattctctttttgagtgaagatttctgagttaaataactcaataataaatcaactaaagtatttaaaacattatcatcactttcatcactttctgaattttcaatatcttcatacatattagttaaatctgataaaattgagaaagattcactttcacccgaatataattctaataatgctatactaaataacattactaaacatttattcaaattaattgatttacattcattattttgaactgaattattaatttttttccaaattttaagagaatttgatttaatttcaattaattcattattttctgaatctaatttatttaataattcttcatcattataagtattaagtttagtgacaatcatacctgaccaatcaatttgagttttacaaatatccattaaatcagacaaaattgattgtaatctttcatttgataatttaataattgactcattatatacattaaatgaatctttgataaagattatatttgttaaatattctaaaattgatttaattgaagaaactagtggtaagatgagggttttatcattcgaattaataattgaattaataaatcttttattacctctgattaaatttaataaagaatctaaaataaatgtttgaatatcattcaatgaattatttgaagattttaattcatcagatgcattattaattaaccaggttgtaattttttcaaattcttcaattttatcattaattgtatccatatcaactttatcaataccattatttaaatttgataatgaagattttataattttagatttacttaatttatcaaatgataaacattgtctagttaatgcttttataagatataatctatttaaaggtttcaattcaattgattttataattgattgtgatattttaattgataaagtatgtaacattctatcatttttagataaatgatttataaagcaacgagttaaattttctgagaatataattaaataaaattgtggaataaatgaaggtaatttaattataagttctaatatttgaagacctgtatgtttacgttctgaacttgaagaatttgagaaaaaagttgaatcaaaagttggccaaaatgttgataatgttagttgattgttgttattgttgttattgtttttactctttttagatgaatttttctgtttctttgaaatgtgagtagtttcatcattaagggataattcattttcaattaattcatttaatagtggtacccaaacataatgaagttgagcagtccaagaacctttttgaattttattatctttattgttgttctcattttcatcatcatttaagttattatctataattctatcttgtaaagcatcctttaataaaggtaaattaccctttgttaaaggatcatcatttttccaacgaataattgaagaatcaatattagccttttcagtcattaattttcttaaatttgaaggtatattaatatataataaaacagaatccattgaaattaataaattatttgaagctaatttagagataatcaagtgggattattgaatcatttgatattaaattataagattgaataaatttaataattgtaacaattgcaatttctctaatccaagattttgctagggcaatttcaaataattgattgattattgatatatgtaaatcaatatcatctttccccaataaatttgaattaattaaagattgtaaaccaaataatttaccaaataaataacaacgtaaatttttacccttttgtttatttttaatagaagaatcaagagaagaatttaaagattgtaaaaattgtaaagcattataaggatagatttcattatttaataaaagtgataataattcagttaaacacattgagaaaccaagtctagccgaatcattatttgaagctaaacctgaaattaatcttttcaaagcatatgaataatcatcaattgaattagcagatgataattcaccaattaaagcggaagcagcagaaattctttcatttggtaaattagaagccaaacgatagtaatgatctttagaaactggcatttgcccaaaggataagttattaaaatctatcgatatatcaaaactttaaaaaactgatttcaattttacaataaaatttcataataattaaaatcctttaattttcatgcatgcataaccaaataattcaaaatttcttctttctactgattacgtaataaataaattaaaaactctccattacgtaataaataaataaaaagacgacgcgactatattatcaaccaatggttaagcagcattcttaaaggttcatttgctcattcgctccactaacaataattaaaatttcagttgtaaaccttcaataccatgtaattgtatatacctctcaaatttaatcctttaattgtacacacacttcatatagattaatcatgtctgcttggaaaaaggccggtatcacgtatgtattctattatactttactctctctttgaaaacttatactaacatcaatcacttcaattattacagcgttaacaaatattttactgtctctgcaaagactgttactaaagctttaaaacctgaatatcaagcaaaagcaagtagaagattcattactgaagttaaagctcaaacttataaagatggtgaacttgtcaaaaatgttgacctttcaactggtaaagaactttctatttaatttatgttagtataattataatttataattataattgattatttatcataatattatattatattatattacattattgtataaaacttatgcagattatttattaaaactaaagatacgtatttattctaatatcctaactattactattactatatagtaattacacttattatagactctccgagaccggattttcatattaaatcgcgagaatggaagtattcatagtttacatgaaatttcaacaaattatttcctataatgtatatacctttatagcttcctttaacaatgcaatcattacgtcgattggcttataatggatcgataggagggaaattattctctcctaatataatatcatttaataaatttaataaatttaatggaattaacttatctaacaaagttaataataataatactaatattaatactaactattacatcaatcattcaagaaaatttcatacaatttcatataaatttcaacaaaataatttcatcatcatcatcatcatcatcattatcaaataaagaatctcaaatacccaaatctttaaatattttaaatgatgttaataagcttgaaaaatctaccaataaagataagaaaaaaccttcttggaaagaacgatggttagatatttcatcaaatgattcagatactgcaacttttactgaagtttggagattaattaaattagctagaaaagatttaccacttttctgctttgcaatgttattattaactttatcagctgcaattgttatgtcattacctaaaattactggattaattttagattcaactaaaaattttacaaatttagatgatattagaatttatgattatactttagatactttcctttatatcatgggtggtttattattattatcaacttttgcaacttttactagaattattttaatgagaattattggtgaaaatttagtttcacgtttacgttcaaattttatgaaaaatatttataaacaagatatgtcattttatgataaaaataaagttggtgatttaatttcaagattaagttcagatgcttatgttgttacaaaatcaattactcaaaatgcttctgatggtataaaacattcacttattttaggttcatctttgacaatgatgtttatattatcaactaaattatcacttataatgttagcttttgcacctccacttttatttttttcttatctttatgggttgaaaattagatctctttcaagacaattacaggaagcaacaggttctttaactaaagttagtgaacaacaattaaattcaattagaacaattcaatcatttactgctgaagttaaagaattacatcgttataattcaaatattagaaatgtttggaaaatttcttttaaagatgccgttacaaatgcaacttttttcggttcaactggcattttaggtaatgttacattccttttaactttaggtttaggtacaagatttgttttaaatggttcaatgactgtcggtgatttaactgcttatttaatttatactgaatattgtggtagtgcaacttttggtatttcaaatttttatactgaattatttaaaggtgcaggtgctgcaagtagattatttgaaatgttagatataaaaccaaaaattgatccaattcatggtaaaaaattaattaataaacaaaataatttcaataatgataataataataataataataataatatctgtaaaggtcatataagatttgaaaatgttaaattttcttatccaactagacctgataatgaaatttttaaaaatttatcatttgatatacctgcaggttcaaatgtttgtattgttggaccatcaggtagaggtaaatcaacaattgcatcattattattaagattttataaaccaattgatggtaaaattttaattgatggagaaaatttagaaaattattcagttcattcaattagacaaacatttggatttgttcaacaagaacctgttttaattgaaggtacaattgatgaaaatattagatatggtttaccactttcattaagtaaaaaaattaaacattcagatattgaatgggcagctcaaaaggcaaattgtgattttatttatacattaccagaaaaatttaatacaaatattggtccaagaggttcattattatcaggtggtcaaagacaaaaaattgcattagcaagatgtttaattaaggaaccaagagttttaattttagatgaagcaacaagtgcattagatggtaaaagtgaatctgcaattaatcaaactttagagagattaatgaaagttggtaatatgacaacaattagtattgctcatagattaagtacaattgaaagatgtgaagatattttagttttaggttatgatggtacaattgttgaaaagggtaaatttacagatttatgggaaaataaaaatagtagattatggaaattacttaatacaacaccatctcaaaaggatgaggaacaatctgagaatgataataatgaaaatgaagaagtaaaagaagaaacaaaggagacaaacaacgatgatgaaaaaatctcacaaacagaagctgatgatgtagtggaacaaaaacctgaaactaatacaagtccaccatctaaaactcgtgtttctgtttaagttaaaaatagaaaaagtgtaaaataatttaaaataacattcaataaatttttattagtaatatattccatttaagtatataaaacctgtagatagaatggatatagagaataaaaagaagaaaagaagaagtaatatttaataaatttgaaaactgtagaagcttcttgaaacttttttttccaaatcttgaaatttttattttttcatgaaatttgtctttttttgccatccatcgttatcaaagttccgttgatgttactaatacacttcttcttcttgtttcctttgaataacaagtatgtctaccacacaagagagaagaccacatcgaggagtcaacttaaacgttacactgacatgtccggaatgtaaagtgttccctcccgatttgatcgaaagacatagtgaaggggatattgtctgtgctctatgtggtttagtactatgttcaagaattattgataatagatctgaatggagaacttttaataatgatgatcaaaagggtgatgatccatcacgtgtgggtgaagcaactaattcaattttagatggtgatcaattaaatactgttattgctgctggtattgatgcaacaaagacagctcgtgaattaaatagaactcaatcaaaatcttttgcggataaaaaatctcatagtttacaatctgcatttgctagaataacttcaatgtgtgatggttatcaattaccaaaagttgttcaagatggtgcaaaggaagtttataaattagtttatgatgatccttcattaaagggtaaatcacaagaaagtataatggcaggtgcaatttttttaggttgtagaaaggcaagtgttccacgttcatttaaagaaatttgggctttaactaatgttccacgtaaagatattggacgtgttttcaaatcaattaatttaattattcaaagaaagaatgaagaacaaggtggtttaattacttatcaaaatgattcaattaatacaagacatacaaatccagaagatttagttggtagattttgttcacatcttggtttatcaccacaagttgcatcatcagctcaaatcattgcgaaatatttgaaagatgttggagtacttgaaggtcgttcaccaacaacaattgcagcgactgtaatttattttacttcattaatatttgatcaaaaattatctttaactaagattagtgaaaagacaggtgtctcagaaggtactattaaatcatcatttaagttaatggtttctgaaaaaactaaattagttgatccttcatggattgaatcaggtaagattgatttatcaaaacttgaatgaatgaacaaattgacagtacaaactattcattattttattctcctataatatactactctactacacccttactctgtgttagcttctttcattccaaaaataaaattaagttaaaaaaaacttttgtgactttataataactataattaataaaaccaaaaaaactttcagaaactactccgataacagatttacatattaacagaaaaaaaagtaaaaaaagtaaaaaataaggaacaccccataaataaggggagtaatgatacatactgatatatacatacatagatatactatctatatacactgtatagaaccctaacacagacccatacaaaacaactcaccaacctacaggcagaacagagcaggtagcccacgtaaagaggcaaaaaatatttatttgacgctcactccacagctcagtcttttgaccagtgccattactaaaccatttctattcctatttctatttccatttcctgttttattttccttttttgtctttccttttctttattttattactaatcaccttttttctttgattaagaaactatatttctgtattactgcatataagataattaataaagtagattagaactactactactaatttgttatcatataatatcctatcataaaagctcatcatatcatttatcattttattccataatattatcatttaatttataccccattacattatgtctgccgcagttattttagctaaagaattaaaggaactttctaaaaatccaacttatcatataactcttcaagatgatagtatatttagttggaaactgggattttatattataaatcctgaatcaccttggaatcatgcatatttaacagctaatattgaatttaagaaaaattatccatttgctccaccttcatttacattctctcctccaattttccatgcaaatgtttataatgatggtaaagtttgtatatcgattttacatgaaagtgtaacaactccaatgtcaggtgaacctgataatgaaacttggtcacctgctcaatgtgttgaaagtgttattataagtattatatcaattttagatgatccaaatatttactcacctgctaatactgatgcaagtaatatgtggagagatagaagagatgaatataatgaaaaaattaaaaaatttgctgaaacaagtagacaatcaataccttcagattttcaaattccttcagatgaaagtattattaaaggttcaaataatcatattgatgaagataattggtattttgatgaagaagatgaggatgatgacgacgaagaagaagaagatgatgatgaccttgatcaaatgtcttatgaagaatcagaagctgaaatgagtgaagattatgaagataatgaaaatgaaactactaagatcacaaattaagaataaagctaatatcatttcatatttctaatcttcttcatttcatatattcataaagtaaaataagtttattcttaatcatttctgtcttcttatttttaatatcttcttcccatttaataccataactttgcttctgtctaatagaccttctttttttttccatctttcctctcttctcatttctccttataaatatctaattaataacgattaacttgtatatctttaatctcttattgaaattccctctatttagctgtcttgccagtattgttacgtaatatcaccaaattttttttttcaagtagaaaagaatcaatatattgaagaagaagtgaaatttttatttgtctattcttataatatacctttcaatcaccccacagcaatggctaaaaaggataagaaaaataaagatgcaaagaaagcagctaaacaagctaaagctgagaaaaaagcatcaaagggtgaatctaaattgaagaaacaatctaaaaaggcaggtgatgatattgaagatgatattgatattgatgcacttcttgaacaacttgcagcagaacaagaacaatttgaagcagttcatgtaactaatattgataaaccatccaaacgtacaaatggtacaatagttgcagctccaatggctcagagaagagaattatttcttttcggtggtgaagttgcaaattctcaaggtattgttcatttttataatgatttaaatgtttattcacctgatagtgatacatggcgtcgttatattagtaaaaattctccattagctagatcatcacattcaatgtgtttccatccatcaggtataatggttttacatggtggtgaattttcatctccaaagcaaagtactttccatcattattcagatacctggattttagatgttgaaacaaaggaatgggcaaaagttgatgaaaaaagatgtccatcaggtcgtagtggagctagaatgactgtttggaaaaattatgttattttatctggtggttttagagatttaggtacacatacaacttatttaaatgatttatggttatttgatgttatgaattataaatggactcaagttgaatttcctcaaactatgagtatgccagatccaagaagtggtcattcattaatttgttataatgatgaattaattttatatggtggttatactaaagttaaagcaggtaaaggcttacaaaagggtaaagttttaactgatacttggacacttaaaatgaaaagtgatatcaaatcattaagatgggaaagaaaaagaaaacaaggttggcaaccaactccaagagttggttgtagtatgcaattacataaaggtagaggttatttattcggtggtgtctatgatttagatgaaactgaggaaactttaagttctgaattttataatacattattaagttataattgtgaaacaaatagatggtttaattctaaattaaaggctcgtaagaagaaggaagttttcaagaaagaaaaagttaatagagataaagaattagaagatatattaaatgaaattttaaaaaatgctaacttaaatgatgatgatgacgatgaagaaagtgaatcattgaaaactgacaccgatttagaaagtaaagctgcttctgatgaagaagaagaaaaaaagaaagaatatcctgttagaaaccaaatgcctcatgaaagatttaatgctttaacatgtgttatggatgatacattctatatttatggcggtatttgggaaaatggtgaagttgaatgtaatttagattctttttacaccattgatttatccaaacttgatggttgtaccgttctatgggaagatttaagtgaaatttatgcagcaactgctgattctgaagatgaattcgatgatgatgacgatgaagatgatgaagatgatgacgaggaagaaccaactgatgctaaattaattgctgaagatgaagatgaggaagaagaggaggaagaggaagatgcaactccaactattcctgatgaaagaccatggcttccacatccaaaagcatttgaatctttacgtaatttctatgttagaacatgtgctgaatttttaacatgggttattgatcaaaacagagatactagaggtaaaggtttgaaaactaaggcatttgaattggctgaaactagatggtgggaaagaagagaagccgttcaaatggaagaagaagaattagaagaaagtggtgttgaagctgtcattgaaaaagatttctccaaggctaccaaaagaagatgattttaggcttttaaaaaggttatcgaattgtcattctaaatagagaataaataatatatttactgtaaatgtgtaaaatgcaatagaaattataatggttaatattatacaggtgtaaaaaaaacatgcttcaagcaaaatgaataccaacttgatgaaatgcgtatagaagttttaagaaatcagtttggtctaatttagcagatcttttatcaccaaatcctgtctcttccataactttttcaactttttctttaacaatttttgtataatctgcactatcatcatataaaatctctcccctttgttcacctaaaaattgcaagtatgttttataattcttttctaacatttctaaaattttactgtttctgaaaatagcatttaatgttttatttttacgattgaaacaaaaacgaagtaaaccatcccattcattataatcaatatttggttttgggaatttaggttcaattttaacaacacttgattcaacttttggaggtggtctaaaattattttttccaactttcataacatgtttaacatttgaccacatttgtgcattagcactcaatctattatataatgattcaccaggccttgcagttaaatttaatgcaaactctcgttgaaacattagaactgcaattcttggaggtttttgcatttccaataatctgaaaacaataccagaagaaatttgatatggagtatttgaaatacaaacatcaaaatatggtatatcttttaatttcataaaatcacccattataatttctaattttttctctaatggagtaccctgaacacgctttgttaattcagctgccatctttggatccacttcaactgcataaacctttcttgcttgttctaaaatacgaactgttaaattacctgtaccaggaccaatttcaagaacaacatctgaaggtctaatttcagctttatcaacaataccttgtgcaataagtggatttttcaaaatatgttgacctaaatcagtattgaatttgaagactttgttaatttgtgcactacctgaaggatctggcttatttttatgaaaagttttctgtgtagcttttcccattgttatatccaatattattaaatgtgtttataatttaatatcctaatgcaatcacctgcaaatagacactctatcgataccaatgaatcaaggaatcaaaagatataaaaacagtgttaaatttcaaagaaaattcatgaaatttcaataaagtaaaaaaaaaaaaattaaaatttttctcggctgtgccacattgaaatttaagtaatgcaatcattaaggaagagtagacaaactttcgctgactttaagttacaatatactttctgtgggtagtgttggtaagtagtaatagtacaatcatataataaacaaaaataaatggcaccaataaacaagccacctaatggagcgggctctaaaaagacaggatcaggatcttattataaatcacagaatgctactgtatcaccagaacagttacgtaaagtgagaggataccaaatgatggttgcaggtgcaattttcttacttattccttcatttgaattatatcgtagactatacgcaggtggggagagacgtatacaaattggtgaattcaatccggttgatggatcaataaaggaatgggaagaagaagagaagataagaaatttcaaagaatcatggttaaccaaattgtttggagagaaatgatcaatgaatttattataaagtattatctttaaccccatatttcatatccaataacgttattacattaattagctctttttatttacattatcatgactatagttttacatataatttacattaacttgtttatttaaacagaggtaattctgttagctccaaattgtttccttgtacctaatgaagtagtacctcttactttgatatttcgaagttcagatgggtatctatttaataatttacttggttgtagtggttcccttttcaatttcatttctctttgtgtcattacagtggaaggtcttggtttaatttctgtggttggtgctattggtgaaatagtgcctaattttgatgatatattaaacgcaaggttttccaatcttgattctggtcggtgtaatgtaggagaaatcttcgaattatcttgacgagattgtgatctactagaagatctgctagaagatctttgtaaacttagtctagattcaggtcttgaaggtaaagggattctagagtgtgatgtatttggtgacactatctttgttctgcatttcggattattaattggaattctactggtacttagcaaatttttagttggtatcggatttgtatcttcacgttcattatcatcactcgtttctattgttttaatcactgtggataattcaaatcttaataacggtatttgttggtttttgttctcattaggttttgatttattgtattttaaacgtgttatttgttgaggttcttcatcaatcggtaacataacatatttttgtgtgagtgaaggtctaggtgtagtcaatggtgtcattagacttttgcttgttttaccaaaatttctactatttggtgtgataaatggattaggtgaatcaaaaatattttttgctgtcattgcatcaggtgaactattggaactagaaaatgaattatctgcagatggtgtatgaggaggatgaatttcatcactaatatcttcaagtatttctgtttttactcgttcaatatattctatatttgattttgagaaaacatgttcatcaataagtttaggagtttgaaacaattttttattttctttcatattttgatttgattcactcaaaactggtttcatattgagtgtttcagttaatggattactgaattttctgattgattttggattattaacccttactttatgagctggcgtttgtggaatattttcttgtaaatctctggaagttaatctcttctcaaaatcaactagtctttggaaataatatttatccatatcatataaatttgcaagaggttttagtatggtcaaagcagtttcaatgttttctgtagaatcataatctggtgtctctaaaagttgaaatattctgtcacatattaaagtaattcgttttactacatacttgtttttgaaatcttttagttccgttctaaatctattaaatgattcaactgtattctcataagatgttaaattctgtataaccaaatctttatatgtttccttagcagatttgcaaaattcatctaaagttattggaatcaagttcaatgattcagcaattggtgaaagtgttatcatggattgatgtgtaatcatcaaaaacatctatatccatgtctgaaaataaaatgaaatcttgtccagtcaaagttttagatttatataattttttcaatcgtacaaaatccattaaattagtatcagaaatttttgaaatgatatcaagtctagtatttttgagttttaattctgatagtttctctaagcaacctgatatctcgtttttaacactctctattattccctctttgagttcataatgatgatttataacagctatacgtttttgaacaggttgaaaagtcttctttataccaagtatcacattgcaaatatcattcattttgtctaaaaatttatctccttcagaaacatttagttcatcaactaaacttaatgattgattaatgttgagttcaagtaagtttaaataagtcattatatcacgaagttcatttttacctgctgatatccaaatgaaatcataatcatttcgtttacttaaattatcaatttcaagtattgcagaatgaatgttttgtaagaatatgtatatttcatttgataaagttgtaagttttaaaaataaatcaattttaccagttttagttgattctagtattttgtctactgtaaaatcattaattttttgattaaaagtgactatatcaacatttgagataattatttttgagatagactcataaaagcctttctttctcatttttatgtatggttagaatgaatcaattttgttaagtgattcaagttgttattcttgcaatgtttttaaagtatatagcaaagatagttactgtctacaatgaaaccaaacaaagattcatgatatgaaacaaatgtaagaataaaaaatagattgattgaaatcaaaacaaactttaatgtttacaattttcttaattgggcgattaggtaatattttacatcaatcgatttatcgatgcaccgtgggaaagcattccatagtaaattttcgacttcgctaacaaaatgaccaaaaatccgcaaaaaatgcttcggcctaattttttactatgggaatggcccgagattgcaaaaacgccttttttcaatcaaatatttttgtacttaaaaataaatatttttgactcatagctatataaatctcttagttaaattaagggctttcaaatgaaataatttttattgcatttggaggtggtcgatttttcccctatataaaaccccttgaaaaagttaccctctcaaaaatttaagtaataagacttcctaattcggaatggaatctgattttgaaaaagtttatttctgttatttatgtccgcttaagcaattttagaatgaaaaatgtcctgattacgtaattttttgaatattaattaagttattaattaattaattaatattaataactcaaccctttatacttattatttttttagtgttaataaacctactttaacaaaatcgtggttgatatgccggcttataacacttcaaacttagagggagaacctgataagtccctaccagctcctaaacggagaaagattaaaaataatgaaatcccattttcccatactgttagtaatgatggttttgttgttactacttcaaaaaataaatctcattcatctaagaaaactgattatcgtccaatgaaaattctacagtttaacggtcagagtaattcaaaagataaattgaaattgaataaatcacctacacttgaagaaaatgaaacaaaaattcttaatgatttagataataaggagagagagaaagaagataatattacccaagagaatgaaacggaaaatgttatatctctttcggaagaggagttaaatttaatacatcctgtactttacaatttagctatacacttcaaaaaatattataaacaaattagatcttgtcttaaatcttctgatgctgaaaaaaaatctttgattttaacacatcatcattatatgaaaagattctcttgccctcgttccaaaagtgaaacagtagttaattggttttatgatcgtttgaatgttaactcaggttacctaacctgtaataaagattttttggaagttgaattttatagacaaactcttatacagttttccaatccaaaatatttgaaacatgctaagtataaaagattgtttggtaatacaccatataccgttcataagaattttgaacaagatctctttaatttgttacaaaataaatcgaattttcaggatggtcattttgagatgatgtattttgctggtaaagattatcctggatttatgagattacctatttcagagaaaagaaaaatgacaattgatgatgtaaaaccattaacaaatgaaatgattgaaaaaaaagttgataaagtccgatactctctttcaatgatttatatttttagagaagctattaaaggtttcagatctgatgatactgtagttgattttatttcagcacagaatcatatcgacaatgaaataccaatatttgattctaatgatttaagtgacgatgattcaacagataaggttataccaatccaaaggcttggttataatttgaatattaaaaaaaatacaaatgaaatgaatgatacaattacgattacaaaaaatcttacattagaagaagaatgtgaaaatgaagaagcacaagcagcttatgaagaagaagaagaagaagaagaagaagatgatgatgatgatgatgatgatgatgatgatgatgatgatgatgatgatgatgatgatgatgaagaagatgataatgatgataatgatatatttgggtattttgactttgatttggaggaattgcttgatttcggtacagagaaaaccggagatgaagatgttatgttgaaagcaggtggtaggatttttagaggagaaacttatgactcgtgtgatgaatggctagatatatccaaattccataatttatctgcaagaaaatgtatgaaatggattaatgatgagtggcaaaaggtaggaactacaaaaatatttgattattgcccatgtggtttaactgcttatatttttgagaaaaagaattattcatcatgccctgccaaattaatgattggtaaaaaggaagttgtatgtggattatcaagaaagaaagctaagaaatgcaattaccagagtataagaagttttcttgcatcaattttttacaacaaagaattaatggcagatattaaaaaaaaaagaaataatcctaaaaaagatgtttatgattcctttgttgatggaaagttttgtgatgcttgccgtgaaaaatcggttgatgaaaatactttttatttcaatctatcttttagttccgatggctgcaatattctcaacaaaaaacatttgagtattaatgctcaacttttattagttcttgatttaccagatcatgttttaaagaagaaagaattttcattcatcccatttttctatgaatcaaaatcaaaacttgatggttataatggtgagtttggtaaattgttattcaaagatttagaagatttacatgacaatggtttcaaaataactatagatgaagttgagtatactatctacgcagatctggttggaataatcgctgatggtttggcgattccatctttttttgaattcaatgccccctcagcaaaatactgttgtattttttgtaatcaagaaaaaaatgatgacattaaaactccaggtttcattgaatacgttaaaaatcccccttcgtatactaccacagaaaaactcagatctatttttaaggaaaaaaattatgaaaaaattgagaaacagtggaatattaaagcagattcaatggtaatgcatttccaagggttagattcaattaatgtggcatgtccagatttgatgcatgtggcatatccaaatgtatttaaaagaattatgcaagttatgactcacgatgcttttttaaaaaggagtcctgtgtataaacagaagattgaagatagatttaaatttctgaatgatgttttgattgataggaaattttttttggatagacagaaaggtacgtcaaatacaatgttggatagcaatatgaaagcaatagataccaaaatgttctctcatattctacctatgtatttcaatgatcatgattacgaagatcaaactttttttgggaaaatcataaactggttagtcgaacttaattcttttattatcgtcttagcatcaaaagaaatcccaaaagagtttattgaagatgagaatggtaaaaatttactaaaagaatcatacattcatttaatgggagaaattcaagagttttttgaaacaaataagaagaaaaatgattttcttaaagaattatttgggacaccaaatcatgcaatggtacatctatttgaaaagttgccaaatattggttgtttgagagagatttggtgttttgtgatggaaagggtatgcaaagaaatgcgttcgatggttaatcgtacaagagacgcattaaaatcattgaataaaaaaatttgtataaaggcaataaactgttctgctgctgcactatcgtatgaatcatcaggctataattttgttgaaacaagtcggggaagaaaagtaattgattctgataatgtgaaatctttatttagagagtttagaaggaatcatcatctagtacatgttgacgatgatgatattattgctaaaagacatcagacaattagtttaaagaatacaaaaatcattcttgaaggtaaagaaaagaatattcaaccgtatggtaaaattaaaagagatggtaaatggaattttataaaatttaaaaagattatcagttttgaatatcaagataaaaaatctttctatgttcaattatcagatgtttttattcaaaaggaatggagaagtacctcatccagaatttttgaacattgcacaaagacttttataactactgaatcgccattgacccactggatatcaatagataattctgttgaaatatacggtgttaaaactttcagagaaaatgcggatccagaagctcatgattcctcaaaaaaattgtgtatagttgatgttaatccagcgtgtcttgatactcttagaaaagtataaactactgtttattattaaatatttcaaaattatatatgtaacaaaatgtttagtaactcattcttttgtttataagtttcaaagttaatgattgttgctactttgcaaagttttgaaaaaataacaatctttgtcatatcttcattttgtcattttttgtatgttagatgctataccaataataacaattttttttttttgatgtttatctattgaacttttaaatactgataatatcaacattaaattaatagtttttaacggttcaaatccttacttatttatatgtatatatatacaccgttggcccttggtcactaacaaaaaaaaaaaaaacgctaacaaattttcaaaatttgaaaattcctgaaaaatggaccattttcaactcgatttataagtgtcttctacacattttcaagagctcatattgtatattcttgctcgtgaagaataggagattacaatgatataatttttgtatagttaatgtcaatatcaagaaaaaagtgatttttgaaatctaccccaaaaaagggattttttaattccatttttgtattacttatatggcttattttttagtctctaaaagctctatcataaagttcttaatttgcacattttaatgatgttatttttaagttgcttaagcatgtctaagtgtatgtaaaatagctctgaaaaacagtaaaaaaggcccttttttgtgagagaataatctgaagaaggctcagcgaatatgcctcgaaaatcatgagaatttccaaaattatgctatagccgtgcctgcttaattaatattggcctatattaatataggagagtaattacactgtgttaagatgatatattattgataaaagaaatagttaattatagagtgttattataaacaaaaagaaaaaggaaaagaattataaaataataaagagcatcaagtatcccatcaactagttggaacacttggttttcttctaaacatcattccataatgaggtctgacatcaagcaccattttatcatgctctggtaagacacgtattggtgtgatatcaactgtattatccagccacatccatcttgtagtctttgaaacatttttgatttcaggatgcagacatttttctaatgaaggagtaatgcatggaatccaaggagtaataatttccatgtctgcaaatttgattgcaagtaaatttttatcctcataattaaacctaagaattctcattaccttaatgaacctccactctttcccgttcttaatttttgcatagccttggcagccatcaagcttcaatttaagtgaacgaataaagatataatcaagttcataaacagaaattagatttttatctgaaataccaaacttccttgaggcttgatttaacaaagttttaagttggctaagatcttttactttttctccaattttgaaattataacaatccatattgtcgattttcattaacgaaattgatctcatatttttatacaacaaaattggaagtctgatccctagagttgtcattgtgtgacgccctgggcgtgtcaaacttttcacttccttgcaaaccctttcagttataaaacaccaagtgtcaaaaaaggaaccaacatcacaccatttttcaaacatgtggataacataatgagttggaagacagaacataatattcaaaaatttgtgcttcttgctcaattcttcaaccctttgcatcaattttatgtaattttccttgagcagtggcacatcttcacgtggaacaccttgagccataaaacataataagtgttgatttatttcaacaagtaaacccagtatctcagaatggatattatccatacctaaattgcatttagccatcaaaggaaaagcatgtccaaacagttttgaatcaactgccttcaatcttgatttggaagcttcttgtgtaaaaaacttgtccaaattactaggctcttcaaacatccctttgctattaggataattttttattgaagtgaccccccaattcaatttttcaaataaattcttgtttaaactcttaaaaagattcttttccaacaacgatgcacatatccttttgggaaacatgttttctagaacaacatgcatcagatctggagatactgaacgcataaaatcaaaaccagtaaaaacagtaaacatgttatcccccttcaatttccatatattagattgagtaggaaactcttttctccgtgccaaatctctaagttcatctgaagtaaccattggattattttcaaggttgttaaatgaaagtggaagttcccccgatttagtactaatcttttgaatcttgcaaaatgaacacggaaatgtagccttttgactttgaagctccaaactagcagctattgagggaatatcccctgtaaatgtgacgatgttgacgtatattgtatgcgtaaccccgtttaatgtaactttaaaaccttcattccataaatccattaaatcagtcatcaaaatctttaataattctctgtttgagcctggagaacttgctctgttttgaaagaaagttggaacaaatgcaaattctttttcttttaaatgttgtggaggtaaatctaaaatcgaaatggcaacaacttcagtattcatcattgttttagaatgaacgttacacccatccattgacaatcccaaattgaaacaaaatgtgttaggttctttctccttttccatcgaccgacgatataagttgccgttaagaacgctgtccaaagtttcattgttttccaaatgtgttgctctatttaattccataccttttctaatcctctcatctaaatacaataatgcaagaaagattctgatactttcatatctcattttcactttccttctttttttaatatcacacttagcatttgtacaatcagttaaatcttttttatcaagaatataagctgtatatccacaggaacatgcaagataagtgatgccagtccccaatgtgtcccattttcttcttatccaaccaaaaattgacttggaagataacccaccaaaaagagtcttcgatagcttatcaaaaacagaaatggaaagttcaccggtacctaaaaaaggagccacctcatattgaactttttcttggtctgtacatttgagtagttccggtatagcttgttcatttaatttaagtagtttattcacttcaccagtaatactattgtctgtattcacaggtctaataacaataggctcttcttcttcttcaatggccatttgttcaaagtattcaacatcttgtgaatcaacatcttgatcttctaagtcatcctcttttacctctgcttcaatgttcacttctacctctacttcttcttcttctatttctttttcatgtctcgattttaattccaattcaatgtctgtatcataaatgtcctgagtttcaaagtaatcatgaatatcttgaatttgttgatttgttaatgaacttagcaaacaattggtctcatatagttgagtacatttgagtacaatcaatgaaagtttatgaactgatgaaaaagaacttattttttctctcttttgatttaaggttaaccttttaacatctcttaatgtcatgtctcttttttctgacattttcaaacgaccaaatgatgggaaatcgagttgattcggaaatgtcaaagcatcctttcctgatgaataattgtacttcccttgaaagtaagaaaatgtattttgcagatacgatctatctgctctttgatctccaaaatgtttcttcatgattcttttatcctctggatcaggacatataataactttcttgaaaaatgaaatgaactcattttgatctaactcatatgaataatttagatcatactttgaaaaacaaagctcgataaatctctttacagtagcatcaaattcagcttcttttccttcttccttcagtggttgtaaaagatctgatataattgtaataaaaagaggttttatttcagaaataaaatcattagcttcatccacttggttgatcttgcataattgataaaattgtagattaacaagtgctggagtcttgtgggtgataagctcttccattccgatgcgttgagagataatattaaagttaaagtactacaatgctatacagttattaaaaccattgttcgtcaaattacaaaaaaaagtcaaaaaaaaatatcaaaaaaatgtacaattcaaaaaacaaagtaacaaagtttaaaaacattttctgacaaatcgaaattatgattaaaaaagccttaaagcaacctctacaatgagtaaatcaagcaagtttccaccaagctaaagttagttttacaagataaaacacttcctttttgaacttatcaacaaaaaaattatttgagattacgtaatcttgcaaaaagcggagctttttttaggttttttaatctccttcggctctaaataactaattttctacccccggaccttgaaaaatttaaaaaaaattcaaaaaatggccatttttgagcgatttttgtttttttttgtaaaatccggattttagggaaaatcagctaaccaataaaacacttaattcaaattctttgatcatttccgcatttttgaaaagtgatgtataaatagaaggtgatttccactttttttatccaagtgttttaattccttttgatctctcttttcttcttctttttcttttcttttcttttcctttcttttgatttactttatcatttattaagaaacaaacatcaaagattgacagtggtagagtatgaacatattacgattttaattaattatttaaataaatactttagagtacatactaacattacttaaacagtgacaggttaggtggttattgttgttggtttttaagatttattctgatgaattcttttcggtaggtaagttttctttttttatttaatcaaatattttcatttaaaaactagcaatcaaatataaagaattaaatactaacaaaacatttaatatagggaaagtgtatcggtttttgaatatttaaatcaatacaattctgtatttttctacaaaataaatgaatcttctaatgtttcatttgaaggttttcttgttgctttttttgatgcatttcgatcacttgtagaaaggaaaaaggtgactggtttatacgaagagtttagggcagatttacatgaaaagtttagggtgtttttcaaggaacaatttctttactggtttgctaataaaatagatgctaatgatgatgacttgaacaatttggtgcaggaaatgttatacttgggatacaaaagatttgatgtttactctagggatgctttaataaactactatcaaaacaatgtggatacttttaatcaatttccaacataatttgaatactaagaatttctttcaaaaaatttgcaagtcacgtgacatttcaatgacatcattagttttaataattattacttgaatttcaatgacatcattagttttattattttttattttttaaatttttaaatttttaattttttataattttttataatttttaaaatccgaaaaaaaatataaatccgaaaaaaaaaatataaacccgaaaaaaaaaatataaacccgaaaaaaaaaatttaaatgccgctccgggttttattacataagcagattacgtaatcgttgcttacgtaaaacagcttaaacattcaccttattttactatggttataaatgcttttggcaaattattgaaatttttttttgcgggccatttttttttttagaaaatttacaaaagtcgggccaacggtgtatatatatattatataataactatattttttcaaataaaatgatgaattaaaaaggctcagctttaatacaacatcagttttgtgattctctaaaataatagatggaagaacattctcaatccggaaagattttagatttgactttttcatcggcagggcaatgtttacattagctatttgagatttattattatttcctaagcgtgtttgtttacattttttaggatggcactgttacgcgatttttattggctaaactatattcatcaatttcaagcctgaagatcataaaaggagtctcatatcccttcttccaaaaaaaaacatttcatgactacatattaaacttttttcttttattttagaaaaagatagaaacagttaatagtattgattgaatgataaccgagatatccagaaccacaagatcaagagcagaagaagtcctttatttacaggaatttacagatgatatagagaagtatgcatttttatttttattattcgagatagattactaacatttaaatattatatactctgattactaacacataactactatagaagaagagaagaacaacatcttttagatgctgcgttgagaaatctccaattaaacacccaacttcaaaaagatataaagaattttccaggtgtggaacttattagtttattttatatagttgctaatcttgtttacaggtatgagaaatcccatgttgtccaggtgtttcccaagatgcaagcaatgttcaggagtgtctgcaaaagtgtgtataaaaattatgacaaaactgtggtaaagtgtcatctatttaatttgataattgcaaatattatgtgctcattagttaaggaaccaaattttgccaagagaattgtgcgtcaaataagaatgtttggtcagccatatcgtcaatttcgttcgaaagaaaatctacaatcgttaaacattagccctcgtgaaactgaataagcaatacatttattaaaggaattgaatctatagaactattatctagctttatatagataactctactaaattatttttatataattttaatgagtttttatcaaatttaatcaaaataacaacaactcaaaaggggctaaaggtaaacaaagaacgcgttcatgcattcatctcaattaggacgaaaagtaaacaaaagataagccatagcccaattcccaatttggacgaaaagtaaacaaaataaggtttgttctctacaaaaaataattacccgatttggaagatgccagccagatctgattttacagttgggctattcaaaaagtcccaaataggaaggttaaaatctatgtaatttagtatgtaaaatttgttagggcgtaatcagtcatttttcggtgaaaaaatttgcaaatttgaaatcccacggtgcatgtggctgattattgtttcgaggtaatgacttccttaatgtaaatgtgttttctatatagtaaagatataaagtctataagtaacaatagttgatggtaaatcaaatcaaaaaaaaaaaaaacttcacagggtggcacttttcaccctcttaacttcaaccttggaaaaatctttatcattttcataaccggctttgataatatcttgaatctttgaaatttctgcatctggaacaggataaggaccctttttatcgaaaagatatttgttccaatattcatcagaagtttcattaagataatggagacgatgttctataaaatcagaacaaatgtttttcatattataaccagagaacaaactaaaacttatattcaaatcatttgaacatattatatcatgaatatgttgtgttatctttaattcaaaatcaattccataaaatttgatatgattaccaaaaattctcttatttattatattatcatttgcataatatgaacgttcaccaacaattttaaatgggctaagacctgcttcttccacatagaaaaacattggagtacatgagaaaacattaaatggtctacgaatatcattaaagtaatcatattcatattcaccagcttcctttaatcttgataattcatataatttcccctgtaatatgttataatcttcaattggattataatgacctgtaattgtattaatatgaccaattggttggccaattttatcagcagttttaagattttgatagtaagattttttcagataatgtgttgcagccattaaataatcaccgtttgattcacttttagctatatttaataatgagaaatatcttgatggtccgtcatttgtataatataacgataataataacgtatcaaaattttcaattttattaattaaatataaatttgaatcagttgcatattcagctgatgtaccctttaaatcatggaaattttgttttgcattagatgttacttttttttgtgcttcaacgaaatctttataataatttatatctgaccatctatcatttaaaattctaattttaatattttctacatcaatacctgcaactttataaaaagttggtgaaattgttgatctatagattgtaggccataataaaagtttataatcattgaaaatttttgaattaaataatacatcagggttatgcagtggtatagttgatggagctatgaaaaaagcatttttgaaagatgatgcaaggactgaaagtacattaattgaatgcctattaaaatttaattttgataagttttttaatccgaatatatctttcatatgaatacaggttgcatttaatgatgggaatatttcattacataatttttcatttgatgtaactgttgggggtattataacttcaattttttccttagctcctaaatcacgtaattgtttaactaataataatgagtaataatcattgtccccaccaccaactgtaacataaccattattttgataatatggaatttcaacattttcaggtattttagaaactatatttttatgctttattttcaacttctctataatttcatcatcgaaaaaatcatattcattgaaaactgtctcagacatatcacgataaatattttcgaatgtttcaactgcattaacacctataggaaatggatcatcatcatttaaaactgaattttgaagtaatgtgaaataattttgaaagaacttggcatatttgttacctgcagtattggatactgtattatgtgaaggtatgaaaaaatatgtagttgataaaatgaaaagtaaacaacaactgatagtggttacccataaagaagttctattccttggtgagtatgctttgaattcttttgatatataatttttatgatcactatacatagttgattgctttttcaagtcatccaacgctgataatttgcaatcaaagaaagaaaggtgaattcttatataaaactataaagttttctcttttatgagcaaatttttgatgtacacgttcgacttatttgtagttatgatgttaatgataatgcatgaaaagaataaacaaatgggagcggacattaggttctccgtttgattagaacaatagaagttgttgaaagaaaataaagttcctattgtttgcaaatgtataaaaaatatatagcttcaaaatcgatataagctttatagagggcattgtttgatgatatattcatttcgtaaactcaaatttttatgaataatgaatttatgggactctacatagaaataacgtgattaagagtgatatatctattactcaaatatttcactgttatttctttctatacaaatataacatagaaaaatgtcgttagttcatagatccaccataataatacagttatctttgatttcaaaccaaaattgagtactatctaatagggggtgttatagaagtctattttcttattaaaaggaacctttttggatgcatcaaacttgtcattttagcgtgtcttaacaatatatttacgaaagaaggggtccgcattgttaaggttttagttataaggtgaacaagagttagacaatagaaagtttaattcttaaattttttcaaggattttcaaacttattgtcgtggtttgaataataatggcccctaatttcacatattagtaatattttgttaaaataaaagctacttcatcctgtagcctccgaaacttttccgaatttgataacactaacgccagttaatgtttctaacctggtctatcgctcaccagggttaccctgttaagtatggcctgaggttaaagttttatctttttgttgtattttattgagaattaattatccaatagaattgaaagaataaaatgtacacaaactataaaaccttatttagattttaaataatcttctctgttttgctttgataataatgaacttgcactatttttcaaatgacctctatcatcaagttcaactgtacctcctgtttcaaataatgagaccttaccaagtaataatccaagagtatccagtacttgatttggatcatttaaatatgccttagcaactgtaactttatttgcaggtccaacagttattggatataatccataactaccatgtttattaattccacgtttttcttcaatccattcatcttcaattttatttaatgctctaaacatatcttcatcagttgtatcatctccaagacacacgacaaaatctggcagttcattcatatttttactttcttgagttattggatcattacatttaactaatcttttaacaatttcacctttattaacaaactttggtctaacttcaagatttgccttacctgacataacttcaacatcatatttatcatttaatttttcaattaattcagctttacatttttctgcttgatatgatcctaaaattggatccgctttacgataatgccatgtaagtgcaactttcttcttttcagtaaatgtaccaggagttttttcattatatttactgaaaatttcttcaacaattgtttgccatgacatatctaaactttcagttaaattgatccattcttgctttttagcctttttcataaaacatccatgttctgcacttaatccaatttctggatatttagatccaatccatttttctaaaaatgcttggtcacgtccacttataatccaaacttcattatttggatcctttgttaatccttctaatatatcataaagtctaatagatggaattgctgcatttggatctctaacaattggtgttaatgtaccatcataatcaaataaaaacattctacgtgatgatgtttcataacttttcaataataatggtttatttaaatatggggtaccttgacttgaagtttgtgttgccataaaattcattaagttggaaataactttacatgtccaatctttgttactatttttattaactgctttataaagtttattttcaatgaatgatttcttttcattacttaataataaactttcattgattgcattagcaacaccaactgaatcccatggattaacttgaattgaatcttgtaaaactgatgttgtaccactgaattcagataaaattaatggtgaacattttaatttttgacaaacaatatattctaatgcagtggtattcataccatctctaatagatgttattaaacataaatctgcaactcttaataatgcaaaatattcttccttgttaattctcatattataatgtgaaacgggttgataattaatagttgaatattttctattaatattagaaataagttcattaacttttttttctaatttagaactatgataataaggtgtaaatgaaacttgaattaaaacaactttttcacgccattcaggataaatatctaaaaacagttcaaaagcttgtaatttttgtaccacacctctaacagagtctaaacgatctctaccaattataatttttctatctttattcaattctttcagaattttgattttatcttcaatttcaggtttaaatgcatctttttctaaacttttgatatcaatacctaaaggtagtgcaacaactttagatgtaaacgaatgaacagtaacttctgttggtgttgtctcataaccattaactctagaacaacaactaataaaatgtctagcaaatgaataactttggaaacctaattgattggcacctaacataccatcaagtaaaattttcctctttggtaaacatctgaaatattcagatgatgggaatggaatatgtaagaaatgacaaatataaacatcttttaattccattcttaaaagttggggtaaaagtaataaatagtaatcatgaatccaaataatatcaccaggtttagcaatttgtttaatcttagcagcataagcttcattaaatttaacataatcataccaccaagaagtttcctctttaccatcatttggttcattgatcatataatgaaatgcaggccataaaacattttcagcgtattttctccatctatgttgatcttttcttaataaccaaataggatgaatattatcatttttattactttcttgaattttacttgtaatttcctctttatcattttctgttaaatataggggatctttatcaaatttatcaaattcatcatcctttgaatcattaaacagtttagttttattaaaattactgacaatttcaccagtccaagcaactaaatgtgtttcccattcactttcatcatgaagtgctttatttgaagcatataaagcagatgaaccacgtaatgttgaaactttccaatcaccactttctgttttaacaatttcatttggtaattgtgtcatacaattgatgattcttttacttgtcttaagatttgatgggaaatcatttggtgaaacccagccatatgagtcgttatttttggtcattttttaatttttgttatgtttaatatattgaatgttaaaaaaaagaaggttatgcaattgaaggggataagtaggtaaactagtaactggggatgtatgggtatatataaacagttgaaatacgttactatacgataataataatttaaaatatcagttggccagccttaaaagaatccacggatgccgtaacgaacaaactttacagcaaaaatgaaaggtgtcaggttaatgttgcaatccggaaaagtgtcgcacttatgaagtcatcacattggcggggggcttcgcggagtgaacaatagggacacggggaattaactgttctggggaaaggcagtgaatggttatttacatgagggtatatcggttgattattaaattgtatatgcttgaagcaactttttagcaaataaacactattaaaagacaaagttataaagaatgaataagaaaaataatatgaattgaattaaattaaattaaattgaattgtagagagagaaaactcatgaacggatacatattttagaaccttctttgagtctttcaatatctgtagttgtagtagatttatcatccgatgtaacagcagcacctggagctggtgcttttctattatgttgcatatgtgattgaactaaatgaccagcagctaatgcagaacataatgataattcagaagctaaaacagctgaagcaataacttttgctaattgtcttgcatttgcaccaggttcagatggatgtggacctttaatacctaataattctaacattgcaccttgaggttctaaaactgtaccaccaccaattgtaccaacttcaattgaaggcattgaaactgaaattcttaaatcaccattaggtaattttttcattaatgtcatacaatttgaactttcaacattttgtgcaggatcttgacctgttgcaatataaacagcagttaataaatttgctgcatgtgcattaaatccaccaattgcaccagctaatgctgaaccaactaaatttttggaaatatttaattcaactaatgcatcaacatttgattttaaaactttttcaataacatcagatggaatatccgctgatgcaacaatacttttaccacgaccttcaatccaattaattgcagctgcctttttatcaatacaataattacctgaaattgagacaacattcatatcatcaaatccaaaatcttctgccatacatttcagtgaatgttcaacacctttagaaatcatattcatacccattgcatcacctgtagttgttttaaatctaatataaagtgaatcaccagcaatcgcagttttaatatgttgtaatcttgcaaatcttgaagttgaattaaatgcagctttcattttactttgaccttcttcagaatctagccaatttttagctttaccagctctggttaaattagggaattgaacacatggacctctagtcataccatcagcagttaaaacagtttcaacacctccacctgcattaattgctttacaacctctcattgtagatgcaactaaacaaccttcagttgttgcaacaggaatatgaaatggtttaccatcaataataattggacctgcaacacctaatggaattggaatataacctataacattttcacaacaagcaccgaaaactctatcataatcataatttttatatggtaatttttcggttaataaaactggagcatttgcaaattttgcaattgattgtcttctaacaacaacagctctgagtttatcctctagttgtttctctaatgcatataatggtaatttacctttagtaactaattctaaaacttcactattattacattctttaacattaccagctttcaaaatttcaactaactcatctaatggacgaattgaactttcatcaaatgatgttaaatcagattcttcatcaccagttgtattttcttcagttataatttgaccatctttaacattatcaacatttgataattcttcaattttagaatcatcattaattaatgcaattgaattttcaggtgatttctttgacttcttttttgatttcttctttgattttttagttgaagtaattgaatttgaagttgggatttcaaatgaatcaatatcatttaatttagaactattaagaattgaattataatcagatttattcatgatcatattgaatctagcaacattcaaaagataaatattaattgcaactgaaatacctgcaatcataaataaaaatttagaaattaaaggatcacagatcgcagttgataattttgagaaaattaaaacaatgtagtgttcaatttcagcaaatgctgtagctttagtataaactctaacaggtaacatagttaaaatagtattataagatttattattttgaatattgatatgattaacatgtaataacttctcaatatcaaatgaatcatcaattgaaatattcttaaaaacagctgaatcatcgtataaccaagaagtacctaaagcaaataaatgtaagcctaagaaacctgctaacattgcaatcttaaaaccaacaatactactattatgtttaaagatagcatttgaagtattgattgaaccttgagctacattttttgcaacatttgaactaataccttcttcttctaatacttgtcttaattcaactctacgatgaactttgaaaatttgagcttttaatgataagattgatgaaaaaaatgtaaaagtgaaaagtaaatcaacagctaaaataattgaagctaagatacagaaatttcttaagcctggtaaattttgaatgattaatgagcacagtaaaaatgagaaggaaataattaattgatctctaatcaatggaattgcagttttagatttaacaacatcagcaattatatcaggaatatctttctctgaattcttattgagagcttcaataactggtgcggtaaatgctaatttgtgcttaaatccaatagtagcaactaagaaaggtaaaccttcacttaaagaaactaaaggaattttaatttgtaaaatttcagttgttgcagcaagagcaaataagaaagcaaaacaagatgataagattgaaccaaaggctaaccaaaaattagaaccaatttttctcatttcataaaataattgaaagaatgtaaaccacattgcagtataagctagagaaactaaaattatatcaaaaggttcagcacccataactaaatttttcaatctaaagacaagagatttgaaatattcaaaatatttaccaatcttattatgaggagatcttaatctataaataacagaaccatcatttgattcgatagttgaaggtaaatttgaagataaagctaatgaagaatcattggaaatatttgattcagtgaaaacataaccatcatagactgaatcatcatttgaggcaataaaatttggtaaatgagatgataattctaattgattttgaactttattttcatcatttgaacctttgaaaataattggagttaaaaaccaataagaattatcataattattcaaattattaaaatctgagcctcctaataaattatcattattatcattaatttcaaatttttcccaagtatttgaatgaaatttattaataaaagtttccgaatttcttgaaatatcatttgagataaagtcatattcaatatattgatcaaatatagctaaataagcgacacaagctaacagtactgttgatacaatgaaatgaattggtttattggcacaaacatgggcaagaaaggccgggatgtcagagaatagagctgccattatgaggcaaattatattttctaatgtggaggggatatatgaacgtaccttgagtatattacccaaatgaaaatgaaataaccaatgaagacgttgtagtattaatctgaataaaccctagctaaggaactgaattttttttcagctgagcattttctcgactgtttatttttttcaatgtaatttcgtagctctatattaagcttttattttttaaacgagcgcaacgattatctgtgggtgggtgtttacatttcgtgtttggtgtgcttttgaggagtagacggatggtggttgacttagtggtactgtattatggtttagggttgtatattgtagcatgtctatagtacaaatttacctatagatagcatgaaagggaagatcagatatatctaagtcacctgatcagacggttattattttaaaaaaaattacgtgtcgatatatttttacgtgtcttgcaacgggaatgggagaaatccctcatattagaattattgttgtcgatttaaatgtagagtttagtcgttttctattatagtgtatatggggtttcatgcttaaggtgacgttaagagatgatttattggagtataaaaaatgagtcttctggggatatttcatgagactctgaaagtgaatggtaatatgattgaatgttatgcaggccagagttaaagtggattggattggattgataaaatcatttttaaattaaaagtatgaatgatttgtagaacttggaatgtattatttcttagaatttgttatgggggtgggtaagttgatactatgttcaggttttacacttcagtagactaaataatgataaaaaatatgagataactaagggataaagtgttaaagctacgctttcccttttgtactgattgaaatatcagtatggtactgatgaaaaatgtcagtaatgatgatgattggttgattttctgggtgattcggggtataaagtgttacagctacgctttcccttttgtactgattgaaatatcagtatggtactgatgaaaaatgtcagtaatgatgatgattggttgattgattgatttttggatgattgtgattcggggtataaagtgttacagctacgcttttccttttgtactgattgaaatatcagtatggtactgatgaaaaatgtcagtaatgatgatgattggttgattttctgggtgattcggggtataaagtgttacagctacgctttcccttttgtactgattgaaatatcggtatggtactgatgaaaaatgtcagtaatgatgatgattggttgattttctgggtgattcggggtataaagtgttacagctacgctttcccttttgtactgattgaaatatcggtatggcactgatgaaaaatgtcagtaaagatgatgaactattgacgattgaatgaatgatgatggtttgtcgaagagtgagtgtattggttgattggattgggttcttggctgagtgtagtggtaggatttgatggttggataaaatatttgaattggatgtttgaagtggaataatagtcagttttaagactgttaaacataattttattaaatataggattggactttcggtacaggatagttgataacttgaaagtggtagggataaacggatatagtatgtttggttgattcaatttctaggttaggaattctttcagtattttgaatcttattgtagttgggcaaaggtcagcgttttcctattgaataagtcacataggtttttgcacgcaaccttatgctaacagaagggtgaaatggtaatgatttgtaggtttttttaaattttccctaccaatgattaaaaattcattgatcttaccactttcatacatcaaaccttcttgtgattgtagcttggatatacatgatatagataatagatcataatacattataaatacatcctcatggacagtaccacccctataccgacaacttccctcagtaatgtccatggggtgcccagcgaaatcaaaatttcaccaaccgctcaacgcaatacttaaattttcactatcgcagtaattggtagtaccatgttaaacaatgaacgattgatacagacagtcattctttcttacaacaagacatcaaaacaatggctaaagacgttatcagaccacaaaacgtacacaaatacatacatgtacctgttgcaccaaagaatgcagctgcaaactttgtttcacaaaatcttccattagctgcaatgttcttaaagaataaatctctttcatgggcatgtgcattctttgcagttcaatcatatctcaatgaaccatatattaaggatccatctgatgattcccaaccagctatatttagaatcattttctcattagttgcaattgtaactgcatatcttgaccttttattcccatctatgaacactccagttgctgctttaactcaaccaaactcttcttagatcaaattaatatatggaatcagatgctagacatttgtgttcttaaataagtactttatagtttatacattttatatatctatactttatattaacataatatacatttttgaaatcactttttcattcttttaacgtctaatggtaaaacttttggtttcctctttaatttagtaactaaactatgttcaaatggtgaatgacatgttggacatctttcatcgcctggtatcacacttaaaatacataaacaaacagaacaaacataaccgatatcaacaactttatttgttacaaaacatgaagctcggaaatcaacacttgtattacttggtaaaacaatcattggtcttaataatggttcaatgaaaaatgcattacttaagtattgtatcagaccattaggatatttgatatccatatatacaccattagttgcatctgctgtttgttgtaagaaaattgatttctctccaagtttacaaacatcaattgatatcttcatcttttgtgctgcgaaaatggtattcatcattgaaacatatggtatcgtattatcaccactaacactaattactaatactctagccttcatatttaacgtttcttcgtgtttttgaagtttattaattgctgataatgcccttgatatagcccccgttatggtacctttgacaaaaacatcatctttattaataatatctcttaatctctcaggttcattatgaaacaatttgtctaatgtatctaatatattctcatctaataccttgaattggccataaataccaacacttttcaataaacttccatctttctcaagtattgtatcttttaggctggtttcttccgggtacactcgtttaacaccttgtgaaaaactatttgcgatataaagtgataccctattaccactattcaatgctaaatgagaattcatcataactaacatcgatgctgtaacattcctgaaatcaatcttgtcatttgtctctcggcatgatttccatgctaaaggatgcagatctaatattactgttaataatgaaggggtttcatcaacaactctatgtatattagcggcagtgctggctgagctttctccaaatgctctatctgatatagcatccatttcctatgtgtctgtactacctgtatctagtctaatacctctataacaaagtcttaactatatagatcagggccttctagaatgttccagtttgatttcgcatcataaaaaatatttctgttacaaaataattataaaaagcttcatggactgaactttaatgcaccattcagtgcttttctttggattatactgaacgggtaaatacatacgttacataaatggagaaattattacagtggtcaacagcacaagaatcctctgatccagaagttagagcaagagcaccagctccagatccaaaactcttagctcaagttttaggtgctgatacaggtaaagatgatattacattaatgaaagaagatataagtgttttagtatgtgaggatccacagatttcaattgatgataaattaatggcattagaagattttgaaatacttgttcaaaacttagacaatgcgaataatatttcaccaatgggtatatggcctgaaattgctaaattatacacctatgaaggtgaagaatctgatgaattcagaggtttagctgctttaattacaggtacagcagtacaaaacaatactaaatgtcaaaatgattttgtcaagattgttggacttgatggaatgaagaaattagttgcattagtttcaaagaataataattttaatgtcagagcaagagctttatatgcattaagtggtttggttggtcaccatggtgaattgtataagcttttcgaagaatctgatggttggaaagctttatctgattcagttcgcagaatctttcaatgcagatgataaaaaagatactaaagttttattaagatgtctcagtttattgaaaagcttattatatgatgaagttattagcaatattgcagaggtgaaagatgaaaataaagagaaagatgttaatacagagtttcaaacagaaattgtttctaaacaagatagattcaagacattgacagataataaaattgtactctctgtaagtcaacacatatcaaaaaattcacatttcgatgttaatgaaagaataataagcgttttgagttatatctcacaaaatggttataaattttcaactgaagaatcaagtataatacataatgctttgaaagatatttctaagaatgaatataatgctaaagaagttgaatatttggaatcaatcttataattcgatgacatttttgtatttctataatctttataaactttataaacttttctaaaaaaaagatggtaaataaatttatcatacctacttatattaataactcgtcctcatttaatgatttaaacaagtttacgaaacaatgcctgttgatcattcctcaataatctttccccgacaaagtcaaaaccatttttgatatctttataaaatccagcaatattatcatattttctttctgtgaagattttcttagcacgatcttctttcatattcttaaattgtgtcaaaatttcaactcctgattcaacagggatcctcctttgatttaactttaccgatatttgacagatcatcatttctttctagagcatcaatatgcttacagcttaaagtatatgcatatgatttcaaccaatcaagcatatctttcaatcctttaaacatttgaaatataacatcgtgttcaatttcatatttcaagatcttttcccgaatattgtcaggtagaatcaaatcttctaatgtttcttcaggttctgcattgtgttttttccttctcttagtaggtggtattcacagtcgctgttatctgaaacttcctttatttaatttctcttgtacttgtttagcgtgtaatttactatactttgctttcaaattttgcaaaaactgatcatatccaagaatccatattgagactttataatttttatattttagtttgacatgaattaatgtgtctcttcattagtttttctttaaatagcttgattaaatcatttgcatcatacagaagtattaaaaatttttcatcgatttgtcttggaataataggaacaaaagtacttctcgtcttataatagactgaatcagtataccttgaaaacttaatgattggtaatgccaaatcttcaaaaatttcaaactttgtagtttctataaatgttgagtaatcattattgatagtcttaagttgatcgtttagtttgctagaaaacatacatgtcatcttttcagtcaactcatctttagaatatttaacttgattgatctttctcagcttttgaggttctagttcccttgatttttcatacaaaagctccaaacgttcttcggtgtataaatcaatattatctgtaacaacatcaataaatctattacgatggcagatttctccatcgatgagttagaaatagtagtatcataaacgtcgtccatcttccttcttagtactttctattgtagattgaactctacttgaatattttgagacctgtctcaatatctttattttgtctttccttttgtaaatcagatattaaattttttcactgtactactttgtttctttttcatttgtttaagtttttgagtgtgatcatcatcattttctttgttttgacttaggacaatttcattcaaactactactgaaatccgagagaacagacgatggacgtctgattgaagtattgaaaatatcatttgtacttgttcttgaatttttagtcgataatgttgaagttctggtacgctcattggttctttgaatattaaaacttgttttgcttatatttttgctaacgtttgtgtctgtagatatacgtttaattgtcttgggttttgttgagggtattgtgatcgatccaatacttagatgatcttcttttcttattagtgattgggtaaggtagaggtggatcattcatcattatactagagatatcagacattattgaagatgaaatgttggatccattattattattattattattattgtggttttgataggtatttcgattatttgacacatttttatttatcactggtatttgttcatcgtcacttataattatagatatatcacgctctctgttgatattaggagaggaagttggaaatacaacatacgagtcattcacgttcccaccttcttcattctcttcatcatcatctaagcatataacatctgatgatatattatcattaatatgagacttggaaggcagaaatgggaggaatgtcagtagttttagttataaccttcggtcctttcctttggaactccaagaagagccaaaaagtcatcctgatgatcgtcaccagtctgtaaattggttgatacacgctttgttttagtatttatatcagtatctgagtctgaatctgacaataatgagaaattgttattcataacgtttcgacggtactcgccactctgttgtacattttctctactttgatcatcactatcgttctcaccatctagatctatcacctcgtatgccattttaatgctctaatctccgcccgttcagcagaaattggtgtcgttacagggtgcaaatatccagatcaacatatcaggctcactgaaacgacgcgtcatgacatgaaatctccatattataaaaaagcagccaatattacccaaaacggcaaaaggtaaacaatgaaaaattatttcataatgatgacaatagcaaagccaactttgatgattttatactataattgtttgacttaattgtgtctcttcttgtgccgttgttattaaactctgtcaccccgtttccttttgtttcgtttgctttgaaagtttttttttttaaaattcattgaatttctattaatataactctattccagggtgtttttaatttgacgttttaattcttcagattacaacattttcttttttcttaattattacaagtcaggtgatactagcaaactcaaacatacactaatcatgaaaattatatcattcttcaataaaatattaactgtcctattactagcaggtgcaactttgatgttgttattcattgtattctcaggttcagttgataacttccctttcaacaaattcttttgggttgaagctgatagtttcatctctatcagttccaggtggtgattatgctagatggactttctggggtatatgttacccagatgaattagattcagcttctactagcaattgtccaaatttaggtccagatgttccaatctctccatacgataactttggcaactcagctaatttacctcaagatttcgttcgacaacagtagtacttactattacttatctagattttcattcccattccttttaattgcacttatcttctccggtgtttcattaatcagttcaatcatggctccatgttggttagcaatgcaaaaagttattgttttctttgtcggtttaggttgtcttttctgtaccaccggtgcttgtttaattacatctgttgctgttttaaccagaaatcatttccgtgatgctgacatggcttctaaaattggtgcaacctctttaggtttagtatgggcttcaactgcttgtttaatgattgtatttttaacaagttgttgttcagctactcgtaaagtttacaataaggaacagcaacaatttcaacataatgtttcaactcaagctcctgttcaatatcccccaactggattaccacaaaatgatgaattaaaccaatttccccaacaagaaagttcaggtattagatttttcaagattagaagaaatcaagaaaaagcagatggtgactctgttgtttgattttgatcattgaacttatttgactttcaaacattctaacaatttaacatttacaataaaaaattcacaaaacaaaaaaaataccaaaccgtttacctactttcattcgtttttaacaaatatttaattttaatagtatactcaaatagagtaaggaaggaactagatttatcttttctattctacaatttattatttagctttttatttttatgtaattataacattttctatattttctataaactttatatagttaatctggaatatacattcttcataaaagttctaaaatcaaaggatgacaataaatcttttcttccttcaaatattgcactaattcatgttcaaaattttctcggatcaattggttttgttgtaaacatttcaaaagtaaaatttgacagtaagtaaattcaaaaatatttggatcactgaaaagaccaaaacatccatcaattatattattttctgtaatgtattgaacaatatcattaatatttgattctactgctatggctaagttcttcaaagccttagtatttttcaattctgttttattaattatttcaatcaattctctaactttttcaatttgatttctttcggtattggatttctcaattgcaaataataatgaattggatgcaacaagatgttcaagtttcaaatcttgatcaaggaaattcaatgttttagaggtaaccaataattcaagtaatgaaccattcttcaattgacagaaataacctaccattaatttttctgtgattataggcaaagaatattcactttcattaattttcaaaacaactttattcaaatggtttgaagaaagttcacaaattttatcatctgcatcagttaagaaattgaaaatgaatgcagttgtttgtaacttaatatgttcattatcacccttaacataatagatttcattgaatgcaattaaagccttaagtgctgaaatacgtataacaaactctaattcatcatccatcatcttctcaaccattgacatccatttgttatacatactttcatacttgttagagccataaaccattaatttggcaatatatgaggctagtgcttccactgtacttaatttgatatcttcattagtttcagatgctaaaagttctaacaattcattactatggaattccaaggtttctatgctatcactagcatcagattctataattaattctttcaaaagttgcaatgcttgtgatttgacgtacttccaagtggtattttcatctgtttctaagagcttccatatgttgttgacgagtacttctgtaactttttgattgagcttataattttttaacttatttgcataatgagagatacaacttaattgtacttcgtatagtggagataataagcagttttgaataaatgaatattcttcatccccttcaactagatcaaaaaataatgttagaaagttctttcagtgcaagttgtttagatccatctatctctaagtggttgtcgttgttaaaccagctgagtaactcatacttgacatttttctcttcttcagctgtaacattcagcttcagtatatttaaaatttggaagtatgtgagtttaataggataacattttatatcatttaaaaccattaggacacttcttcatgaaattaatccttgtatcattatcaagctcaaataactttttagcagacttacgtgactcttcagatgataattctaaaaacttcaaaataatttccttgatagccaacaaagaaccatgaattttattgtaatcctttgattccaaattaatattctcaatcaaactatttatgattttttcaaagttgacactactagtcaatcaatgatggcaaacttctggcagccatttctctaactttccaaattttattttctaaaattttagtaataacaggaatgaattcatcaagaccattataaccaggtgttggttctaatctacacatgattgtcaaaattgggaaaactttttcaatttcactttgatcctttaatccattggtaacaggaatcatttaatgcctttaaaaataactctctaatagactcaaatttctcaaaaaacaatctagctggataacttgttaaataattggctttaacttttttactactgaataaacgattttgtaatgcagtaaacaacataaccgcacagtttctaattgaccaatgtggagatgcaaatgagtttaatgttaggacaaatgcttcatcgacatgataaatagattcttttgaaagtgatgcatcagtgaaaatggttttgatacaattaatagcattaacttgaggtaagtttatattattcatatcagcattcaattcctcgactggcaattgagcaatctctatcaatttcttgaatgtggaaccaactaaatccttattactaaaaagaatagctgttagtaaaaatggaataccagcagatctacgcgtaatatacttggatctagcttgaattaatttcaaattttcatctaaccattgttttggaatttcttgtaaatcctttcttgatgtgcatactgaacaacatgaaatgaatgttaaataaacagatgaaaatgctcctctatgtctaatagttgctagttgttctaataataatggaccaattgtaataatgtttttcgatgtaattggtgacagcttgaattttaacatgacatctaacatatttgatgattctttaacacttctccaagcataacttagaataacttgtgttgctttaccatattcagcttctaattcagaggtatatttattttggaattcttccaataatataccttctggtgaatcatgttgaagtatcttttgaacaatatcccaaatttctattgattttgaaatcaatttagtaaacaagtcattttcttctaaaatatttgaacattttttaaagttcatagtttcaaagatgaatttaaaagctgcaaaataaccttggttactataactaatacaagcagttgtgatatctttcttagccatattcaaagaatcatccaacctattcaataataatttgactatttgatcacatttttctaaatcgttttcattttgataataattgaaagcaaactggaaaaatctagcaccagaatcaacttctttacccttaatatcgcataacatagttaatgccctattctctaacaaatgcatatcaacatgatctgttgccttgaatggtgaaattgcaataatctcagatgcaaacgttctaatgtcatcatagttatccataatattatcaataaccaatcttaataatgaatctgaataaatatccaagctataaacaaaattcacttttgacttctccaagtttctcttattaactctagagtctaaacctgatttaattagtacaatcaataacttaaatgccatctcttttcttaagtatgaagagtttgatgtaagattgtgtttaatataatttaataaatattggaagaaaagcttactttcttcaacggaattaagtttatccttgatttctaccttgaaatttttcatagtttttctttgttaaactttgagcatctctatgcaaagcgtatgtagaatctttaattctagaaatgaatctcttgaaacaagagaaaatttcatttcttgtttctaaactaccatcagtgaaaaccatatctaatgattttataatggtttgataagtaaatgtaggaattgcctttgataattttggtgaagatacaagtaattgaacagcagaaattctataagatgcattgttaactagtagtaaattttggatttgctttatatcaatcaatgggcgattagttgaaggatcgatttcaaggaatggttcaattaaaatagcattatcttgtgcaacttttaaagttgataatagaataggagtatcattttgtttaataatttctttaatgaacttaatagtacaagattttgaaacttggaataaatttggtaacaagtaactttcaaccccttttcttaaattttcattttgtaagctttccataacatgagattgccataggttcatccattcatcttcagaatctgcattataaacataccttaagaacgagaaaaacatttttacctataacacttcctagaactcttgaccatatattatcaagacaatcggaaataaaatttggtttcttttgtaaaataaaatcatttggcttaacatatttatgtaaatgttcaatcataaaatagaaagctctcatagtataaggcatttccaatgaagtctctaaccaggaagtgaaaatcatatctttgacatcactgtcaagaacaacattcaaatatgataacattttaataaataattccttaagagcattcccaagagcggcacctgaatcattccaaaaatcaatgacataatggaaaatgacatcagctttttccttacttagtaaaggtttaaattcatctctataacctgaattttttcgaatctaattgtaaaaatctagatatccaaatggataaagtatcacaggcaaaggtacgatattgcattgaaactgaggattcaatagtggattcatatatttcatcaaatgttcccaataattcattcttttgatcatcattagaaagttttttcaatgataaaactttttccttcagttgtttgaggtgttcattgacatttttgttctccattttagcaatttctcaaccaaacaatgagtagtttcaaaagtatgatattatcacttcagtggtacacttatctaagatccgataacagattataagccccccctggtaaacctgtctaaaagaagtatacccaaagccaaaggaaataattatgaaaagtcaaacctaaaaaatatcggaatcttctgcgcataatttattttgaaaaaaagtggcttgttgactttgactttgttcggtaattcatgctcttactaagggtgttgacatcttctttataatgatttaattctaagggtctctcttgtaggttatttatagacactaagaatggaggataagtacattggattgtttttggctataagttcatccttcgccatcggttcatcatttgtgttgaccaaaattggattattgaaggatggttcaagaggtgaatcattatcatatttaagtaacccagtttggataattggtacaacaatgatggcaatcggagaaatcgctaactttgcagcttatacatttgcacctccaattttagttacaccattaggtgcattagtctgttattattggagcagttttagcatcaattttccttagagaaactttaggaattttaggtaaacttggatgtgcaatttgtttattaggatcaattataattgttttacatgcaccacaagataaggaaattacaacagttgatgaaattttacaatatgctggtagaccagcattcttagcatatttatttattgttggatcattctctattttcatgattttgaaaattgcaccaaaatttggttcaaaacatccaatgatttatatttcaatttgttcagctgttggatctatatctgtttgtgcaataaagcttttggtattgcattaaaattaactttaagtggtaataatcaatttagtcatccatcaacttatattttcattgtaacagttgttgtttgtattttaacacaaatgaattattttaataaagcattagcacaattcgatacatcaattgttaatccattatattatgttacatttacaactgcaacattatgtgcatcatttattttatttggtggttttaatactacatcaacagttgatgttatttcattgttatcaggatttttaattattttcagtggagtttatttattagatatttcaagacataatccagatactgaaaatcaacaattattttcaaataatagtgaaggattaaatgatatcccattaaatagtgaattttcagcatatcaattcagaaaatcaatggagaattccagacctgaatatggtgatttagagaacagtcgtttaaataacggtagaagatcagacagttttgaaatttaaaattaaaaatgaacatattcagcaaattttattttattatttatattagtgattagtattttatatcattttattttatactattttatttgatattattttatattatttattatttattagatattattataatttataaaataaagtaatatacgaaaatgatttacagagaaaagaaatttgtttgtgcaaagaatgagattaaaatgaattaaatgaaaatctaaaaaagcctgtttgtatttgtaattataattgtaattgaatgataatgtgatatataatttaaaccattaaatatcatcaatatctaaatcacttgcttcatcatcatcatcatcagaatcagcaccgaattcgaaattcatatcatcttcttcatcaccaccaaaagtatcagtttgattaatcttagcagattcaggtaattcacctaatgaaactaattgtcttgcttcatctgcattatatttatgaacaacatcacattgttcatcttggaaatctcttaaagcaactaaaataatatcaccttgagacatccaaactttctttcttaatttacctctaatatgagcaattctgacattaccatcaaaacatgaagcttgaactctaccattacctaacattttagtaatttgagcatattcttgatcttcctctcttaaaatcaactctctcttagagaaattctcgttctttcctcttcttctattcttaccacctttacccttacctttattagccattgcagtgtatagtcctctagaaaaaccacaaagaaaacctgctatataatcaatcctcctcttcccctggacatgtcttccattcaaaatttttcactctcaaaaaaaattcactaaatctgtgcaccttattttttgcttggtattgtatatctgtacatgattattcaattgtctttgcttcggtagagagaagagtagggtatagaacatacacagcagtgaataaacaatcatagacaatggactcgtttgaattacagatgcagttgaataatctgctcaaatatttaccttcttccaaacaggcatcattagatatctgttctttcctaatacgaaattatgtatctcaagaggatttatatccaactttgttaacagttttaccaaatgttgatataaacacaagacttaatatatttcaatttattgaagatttcctatatttaattgttaaagattccaaaatataaaaataatgatattatttataattatgttttcctaataatcatggatttacctaaaattttacaacaaattttacctgaaactccaattttcaataatactgatgataccaatgataaaattaataaattatctgaaataagaactttatctaatttatcattttgttataaaattttaattcatatatcaaaattatttaatttggaaaaattagaggattttatatcacaatacgaaaattatcaattatccaatgatgatattgaaaatattaaaaatggtaaaatgtttgatgaatctttaatatatactaataataatataaatccaactaaatctagtcatgtggatgactatataaataatgaaactaataatattaatgataaaaacgaaaattcttcacaattagaatcaaattatatacctgaaaagattaatcaaggattaacggaatcttggaattttatcatatctaaaagaaaacaaagtcaatatgaaagtatgctactgaatatgttagatgatcctttccatataaaagaatttgaaatgaaccaaaaattaaattcaaacaatgatgataaatcttcaaagacaccttcaaagacgccatctaaaactccattgaaaactccattaaaaactccattaaaatcacttaattcattacaagaatcatcttcaaaaccttcctcagcacctccaaaacatgttctctcattatctcattctttaattatgcaaaggattgaagctgatagagaaagacaaaaacgtggaaaggaaactttatgggagttgaaagaattgataataaaatttcaatatctgaatttagaaatattttcaatactttaccatcttataatccagttgatgataaaccttcacttgatgaaatgaataaattatacaatatgtgtacattcactaattatcaagataataatagtaataataatattaaatatgatttaccaacaggtccaaaaccatcattctgaacaaatatcgtcaactaaatcaaataatagttcaaattcaaataataaattatctaaatgggaattagaacaaaaacgacaaatgtataaaccctcacaaactcaacaacgttcacttcaagctcaacaatcacaaatgagaagaggtaacaaatattcaaaaaaaaatcaacaaaatcaatattcaaaacaatactatcatgatcaacattatgattcaaatggaagaattggtaataacaatattgattatagggattatagaaattcttattatgatgaaactcaaatgaatggttatgataccgttgattataataccaattatggatatcctcaagaacgttacatcgagatccaaaaataactataatgatagtcataacaatgactaatccaaagagaagaagaagataaaactgtcgtcatatattatgggaagaaaaacaatatttgtataaattcccagttgtataattaattattcatttctaataaattaataatctaaagaagaaaaaactataaaaaaacacgtatctaaagtatctaatctaataaagtcatgaggttattaataccttttaatgaatattttgctgaaattctttgtttacctgattttccaacacaaactgatataacattaccatcattagaatcattattttccactaaagtattgaaaaatgtatataattcttcatcaatacgtgtatttgaacctgcaataaagaaatgtttataaggtttataaccttcacttaatggtgataatgatgacattatactatccaaattaagactactagttgatgttgcaatttgcattggaatacctgttaatataggtgatgaaacatgtgatgatgagttagatctatccattgttgtttggaaaactggtgttgttgatgaaaatgattcatttaattgtaattgtgtaatattttcattattaatagtttgttgtgatatgcatactaaagatttattaattagattcatttctttaataactaataatcccttagaaatacttgcatgaatattataatctttactaaacagttcattaatatgtgtaattaaatcaccaattaatccatttctataatctttatcaatattagatgaattatctgtatggaatataacagtacattcttcaacttcaatatatgatcctggtaatctctcacaaaatgaattaagaatttcaacaactgatggtatccattctttttcagattcttcaataactgtaaaccatttatttgatctaggtaatttaattaatccaccattttcagcaataagtccaactgcaggtaatcttctatacattctcaataattcacttctttgaaataatgaaaatatgaaaacatcattgtttggatcagatgataatttatataaagttttatctattaattgttgttgtaatgaattaatgacttgaccatgaatctctaacttaggcagttatatcatctaaatttaagatataaagattttctaccatcttcattttcatttatgaaaccattatcatactttttctttgttaaaggttctaaaattgtaaaggtttgagcaaaattcaaattttcatatgctaaattaatatcatcaagacattttttaacccatgttttggaatcatttttcaaaacatcttgaaatgtattactccatctttcagttttctcagattcattcatattaagacaatcataaatttgttgtgaaacttgtttaatattataaggattagaaataaatggaccattatttaaaacaaaggcagatccaacaaattcacttaaaattaatggtgaatgtaatttttgtgttgcacaaataaattcatgacatgttaaattcataccttctcttaaagttgaaacaataaataaattcagcctttgctaataatgcaatatattgttcaaattcaatatctctatttaataaaataattggttgatcggttgatatatttttagttctagaagttaattctttccacgattcgataaaacttcatttttatattcgtcatcagttgtacctccattaatacagattaaaattagtatcgtatcacttatatattcaggatgatcattcaaaaatctttcagtatgctaataatttttcctttaatcctctaattttatcaattttatctctactaacaattaattttttattagaccatcttttagagattaaatttttccaattagcaacaacacttgattgtaattgattatttaattcattaaaatctaaaccaattggattatatgaaacaactgttaaatgatctttatagaaaacaccatattcattaaaatcagctaataataatctatttgaacattgtaagaaatgtgccatatattcttcattttgaaatgtaatacaatctgcacctaacataccttctaaaatctttttacgttgagctaaacaacggaaaacttcacttgatgggaaactaatatgtaagaaaaatccaattttcacatgtgggaattaattttcttaacattgaaggtactaacattaaatgataatcatgaatccaaactgtatcaccatctttataatcttttgcaattttatctgcaaagatttgatttgccatttcataatatttccaagatttattttcaaatgcattagaatttggattatcaggtatttgataatgaaatattggccataaaatttgtttacaaaatgattgataatgaccttgaaaaatttcatcatcaaggaatacaacttctgaatcgtaattatcttttaattcatttgagatattttctttaatatcgtttggaataatatctgatgcaactgatgttgtgccaacccatttaaatttttcaactccatccttttgagctaattgaacactattgattaaactcatattacctttcttaaagtcaacaacttcccatttagcattacgaaataaggaattcttatcagttgaaaatttatgaggtcttgaaaatccaccaaatggtacaactttatcacaatcacttaatataccataaaaaccaccttcttcactattcatcagttttgtaaaatcttcagaaatacaatcaggttgatattctcttaaatttgagacatggatatcatcacttgtatcgtcatccactgcatgttcattatcatcatgttcatcgttatcatttttgtttttatttgatagattatttaatttatcatcaagtgtaattatacttgaagttttcaaatttcttaaacttggattattaaaacttcttctaattctcatacttgataattttggttgagtttcacctttatgaatatcagtaactaaagtttgttgagattctgtagttttaataattgatttaggtttaacaattgttgaagaattcaaactaactggtgaataacttgatatacttctgaatgattcatttaatggagaatgatcagtaacttttccttcaagtttttcttgatataatgattgaactgacttagataatgacttaacatcatctagtgatgttgtattacttaacggcattgtagccttattaggattattaaagaagaaatcctccacagagattgattcttcattatttgatcccaaaagatgggaatattgagactgtaaatgaaaacttgaatgagaatgtgaattggtattaagactatgatgtggatgtgggtgatgatgattctgatgatgttgtaatgaatgagttttagttaatttttcctcataataagtatcactctcagttgaagcaattgaatctaaatcatcgatatcatcatgattaatattacttatattcatagtatcattaatttgattaactgatgaattagatttagatacgtcattagataaatattcaataattgaaacatcattattatgttcattttcatgatttttcaataatgttgggttagtttcattaagttcagattgtttatctgccttgattggttcaaaataatctgctaatgtttcatcggttgcaaaatctgctgatccgatgttcaataattcaaattggactgtgtatggtaagaatctatattaattggataaaaagtataggatgtttaaattgttagtaaaagctgttaaaaaaaatttattgacctttttcaaagtcaattatgtttaatacatacagtgatgccacataaatcgtcatttttgttagatatttgttgtttaggaaaagaaaagagtaataaaaggaaaagataattaataaaggacaggtagaaaaagtgtactataatttgtagaattgtgcatgtcatcttaaattttaagaaattccaaaaatttaaatgtgccacttttccttcagccttattaatgtgacctcgtgaagtgagagtaccttgaatttgttattgatagttgataagcagtatatcaagtgttgttatttctatataaaactagtaatacacaatacaaatatctctaaacattaatacagtatatatcatggatggtgttctgattaaattaaatcaaattcaatcaaattaaataaaatctctatttttttattattttttagtaagttttttccaaatttattaaattaatattggtaaacttaaattaaagcagataaaccaactgcgaaaacagcaaacatgcctgatgcgatgatagcatttgcacctgaatcataagtagtttcatcttcgtcagaattaaaattagttgaattagttgaaacattttttgaaactggtatagcatcaataatttcagattcttcatttgataattctctagttaatttactttttctcttaagtttaatattaccacaagaaattttattattttctgaatcagtaataactaaagatttaccaccaacataagcagaatttttagaatttaatgaaagataagagtcaatatattgagtttcaaaacatgttgtattaatgaaaccatgtttaccagataaatcaccaactttacataaagaatcattatcaaattcatcacaaacggtattatcagcattataaggattgaaagtttcaccagcatcttcacaattaccagaagaagaaacttttgaatcataaatatgatattggaaaggacctttatttggaggtaaaccagtaacatctaaatgaacattaacagaaccttcattagtagaagtgaattcaattatacctttaactaaacctttatcaagatgagctcttgcaactgattttggagaactatcagtattaacaggtgcttcatcagcattaactaaagtacctaaaaggatagttgattgaactaaatttttaattgaaaccattttttataataattttatgagaaatacgattaagtaaagaatacaagtaagatattacaagcaaagaagaatagctttatttggataagaaagaaagctttttgatgaaggaaagagattgaaaagaagttaaagagaacaaaagcaagaagaagaaagaagtagtgaataggaggcaactcggaatgaaaggcaaatgtgttgtttaaatacaagaaaatcaataatattcaaggatattgttttaactgcctaatcaggaaacttttaataaattgccccttttagttaccctgaatctgaattttttttcatgttgccttgttttttcacccttttagagatttcctatttgagaagaatacgattcaagaaaatcaatttaaaaaagaaaaaaaaaattttttcaaattttcaaattttgacgttatcaatcaatattacgtaattattgataaagttagtactgctattacttagtgataaggactctatatttaaaaatgacagttcccataacaaggagggggtaaaattactattaatagtttatctttactgataatataaatcttatctagtcttatctagtcttatctagtcttatctttatatcactattttatgcctttgataggaatatcatcattatttattactattactattattatcattattatttaatagaaacacattaattcccgtaagattccggatatcatgggattaatcatctcatgatgtaattttgatttttagtatcatctgtacaccataatagagctaatattactaataataaactcctcggcacagtataaaacattacgtaacacataataaaaactcataggaaaccaacaatctaaaaaatttactgactgtatcatccatttttccaaatttttttctagtttcctcgaccattattgattagatagctaattatttttcatttcactaaatttttcatttccattttcattttttttatgggttttttttatcttttatctttttttatcttttgtgtgtattatgatgttatagtctttttatctttttatcttttaatcctttgatctttcttgtattactatcatatcttctattatatcccctctatatccttatttcatataacttatacacaagatggctatggcggacaatatctctgaacaaaatagaaatatgagtcccttatcaattaatccacttaataatacttcttctgttgttgttaataatttacatgctgctttacaacctttatcaaatcaatcatctactataatctcacctaataatctttctaataatctttcaaactcttcaaaaatattaaatcaaaatattaataataaaaacactatctcaaatcaacaacaatcttcaaataatactaccactactactaataccacttcaacgaatcatttcccacttccaactccattatcaaacccatctcttaatcatccaatgtcaaatcctatcactcattcaaatatgcctttatcaactactactaatccaaatcctacttcaaataatacaccattatcttcaactattcaacaacattcaaaatctgagagtaatattgatatcaatgataataataataaaaacaatactaatgacaataatactattcctggtaataacagtgatgatgatgaaaattcaaagaaagatttagatcatattgtaccaaatgcaaagacaacaacaacaactcaatcaaatggttcaattacaacaaagcaaaatatgacaactccaacttgtaaaaattgtaaaactcaaacaactcctctttggagaagagatgaaactggtcaagttttatgtaatgcttgtggtttatttttaaagctgcatggtcgtccaagaccaatatctttgaaaagtgatgttattaaatcaagaaatagagttaaacataataataaatcttctccaaatactccagagctaaaggctaaagattcaaatggtattccaaattcaagtattcattcacttaataatggtaattttaataataatacaaataatgctaataatgctaatttgaatttaaataataaaatttcaactaaatttttaccaaaacaatataaaccaagttcaaatactataaatggttcaccaactagtaataatattaacaatatcaataataacacatcttcaacaaagggtaaaggtaaaaaatattcaaagttagattcaaaggattccactaaacttcaacaatcattaaattcaattaattctaaaatccccaaacaaaaattggattcaagttcaactttatcgatcaataatttaacttctccaagtttattacctttattaccaagaagtggacaacaaaatccaattgtaaacaattattcaacaaataattcatggttaaataaatctcaagtacatggtcatattcaaggtccaaatattcaatcattacattatccttcatcaactccaactcattttgtatctgatctgaatagaattacctcacctcttttattagcaacaacaactccaccaaaattaaatgcaacaccaactcaatctcaatcatctgaaagatcatcatctaaaaatggtaatggtaatttaaatagagatgcagtattaaatgcggctggtgcattggaaattttaagtcaaactgcttcaaataaaatttctaataatgttaattcaactacaaatacaggttcaaatccaactttaaactcaaattcaaacttaaattcaaaccctaattcaaattgtaaaaataataatgattttataccaggaatgagattaaattctccaaatgttacaccattatcaaaacctatgtttgataatgataataaattattaccaattagtttacgtcaacaaaatgaatcagttgaaactaaagttaaatcagaaccaattcatttacataatattttaacgcccaataatgaatctgaaaataataatacaaataatactgaacaaaataatgaatcacgacaatcaacagaaactacattacctccaattaaatcttttacaagtccacttttatcaggtcaaataaataatcaacagcaagttcaacaacaagttcaacaacaaattcagcaacaagagaatcattatgttacaagtaatcaacattcaatttcttcattacaacaaaatacattaccttcattaaagaacttaccaggtatctctaatgtaatatacaattctgaatctaataacaataatagtaataataatatacaagaagagaatgagagattacgtacaagaaataatgaacttgaattagtgaatgaattgtataaaactagaattgcagaacttgaacaacttgataaaaagaaaagtttaattattgaagaatatgaagaaagatttaagaatatcaataataccaatgatatctcaaatttaaatttaaacaattcaaattcagaaaaacgtaatgcacctaatgacaattcaatgaataaaagagtaaaggttgaaaattaatgggggtatatataaagttttatatcattttgttttttatcttattagtttcatgtctataatgtaaataataatagtaatttttatcaaattttaggtttatttatataaaattaaagtaaactaacaaaattgaaatttttaggagcgtcatgaatttttcatgatccacaaaaacagaatcaataaaatctatatatcatttaactagtatcatttaattttatgcaggcaaatatccaaattgtaatgaatagcgaggatacaatagcaagtctatatttacaagtgaagaatgaagttactcatatccaaggtaaattaacatttgaaaaattccaaaaaattcataaagattttataaaattaagttcattaattgataaagcagatttattttcaaataatgaaaatttcaaggaaattccttttgataatatcaaatatttaataattaattttgatcatggtaaatttttagataaatatgctcttagttcacaattatcaaatgattcagatcctttgaaacgtaataaattaagaattttagttttagaaattgttgaatcaatgatttggaaatttattaaattagttgtaattgatttgaagatatttgattatttgaaaaccattaatgattcaagtgtttataatgaattaaataactggattatgaattattatgaattaagacaaaatgaaatctcaaataatggtagtaaagggtttgttaaattaaatgaattagaacaaattaattttaaaaaatcaactccaatgaagagacgtgatatgaaaataaataaatggaaattagagaaagatctaaaggaaagaatcaaaatattagatgaaaatgacattaagaatggtggaaataatgatgatttagatgattttaataaatttgatgatgatgtcatgagaagggtaagaattgatcaaatagtattggcaataactgaaagtataagtatgttagaaaattttgcaatggaaagagaaatgttaacacatgttgtaggtaatgctattgatgaagaattaaaggaattaagacttggtgatttgagacttaaggaaataagggaggaagagaatgattcaagaactaagggtaaatttgataaaggatttacggataaagtggaatatttaaataaagataataaaaataatataataagtaaagaaggtaaagtacttcagccatttacaattgttccatctaatgaaaagagaaaagaattacaaggtaaagtttttggtactggacaagaattacctacaatgacagttgaggaattggttgattatgaattagctaatggaggtatggttaaaccaagtgaacctgaacctgaagttgatgaagatgattataaatggcaagatagtgaaacttatagacttacgtgattgggataattttactgatgagaataggaaaggtagtggtaataaaatgagtaatttaggatgatctataatgtctatataatcactgtttaatctgtgtagattcatgaagaactatatgttgactattcttttcattatttaacgttacatatactcttacacgtgacactaacgatttgcaaaattattttttgattcacagtgtaaaacgcgtgtaggtgtccatttattatgtaatttgttattgtaaaaataatttcaacactcttgtcaaacaaagcaacatattatattactgattcgttgttgatttatttaaaattatttgatctcttttttgaactatagtaacaagttacttcaataaacaatgtctagttttgttcctgcacaatttaactctttcacaaacaattttgactttgatgtgcttaaggtaagttttatatccgcttaatgttttacctcgtttcatatacaaaacatgatactaacatccttcatcgatcaactattacaggcagataccccatcaagtttcattgataaatttaagaatatgaagaaacctaatgatttctttgatttttcaagaatgagtaaaccaaatggatttattgatgctcaacaaagaatttcatataatttatcatattttgcatcaaattattttgcaattgtcattttattcttcctttactgtattttcacaaatattccattttttatcttcctatttgctgaattaactttaatatattttcgttcaaaaacattatggtcaagctgaagaattcgatcttaaagttttcacacttcatagaaatatttggtacactatcctattagtcgttaacgttcctgtgttttttatttggagtcctttatcttctgtcttttggctgtcaatcttcagtgctgcaattattgtatctcatgcggctataatggataaacctgttgaaactgcttacagtgatgttgtttgaaatttttacttgaatttatatcaatttaggtgtgtacataatacagttttgtaatagataactatatattctcgttattacatgtttgtgtatgttattcagatcaatatatcttgccacagataaagtattctcgtatcaatgtactcaattaatgtttacgtaagaatttactgccacaacaaaccatttgtcgtgattttcttataatattatctgtaacgttgatttagtaggtattttcactattgaagtgataatattaacgtaagattaatagtgaatatgctgctttggtataagctcaatttttaaatgttaagaaagctttttttaaataataataatttactaatctcttcatgttttcaaaattacaagtttgaaaatgttttttggttcaaagtaaactttttttctaaaatattacatttttactatccacttaaagcctttgagccacaaaaatgaatagatacaataccagcattaaatctacctaactaagtttaaacattataatcaaaaccgttatatccaccctcatattcagataaaggcttcaaataattttttgttggaaggcgctgatttatgaattgaccccaaaatataatactaggccaacctcctccattatgagccactccttttcttttgaaatcatcaatatgggtaaggttaaaaggcctcaatccgtcatgttacgaataactcacgcaatcatactattatcccttttattactactatggtattcaatcagtgaatacagggagagttctgaaaacatacctcatgataaggaaataattaacgtagaactcagcgatgataatgatgatgataatatacaaatctcattcaatcttaaacatatatacaatgaattaccatcagttggcagtttagcgttagatatagtagatgatgatactcataatataaatacattgaaattatctgcactcaaaacagctgatattgatacttcatgtagtataaaggctaaaaagtcaaagataaaaagattaaagaatcggtcaccatcaatggtcgaatcttatatctatcattcattagaaaatccacacattaatacagaagattcaattgagtggtcaattgataatgttttagttcctgatataaaagatccggaaactattttacagttagccaaattggcttcaaacgcatattcaaagttaccagaggatccatcatggagaaatgttagtgatccaggatctaattttggagttggatttaatatcagtgatagttttggttggttagaaaatggacttagaggtcatgttttcattgagcaattagattctaaaactgccaaaaaaagagcaccattaattataattgctataaagggaacaacagcagctggcataacatctataggtggtgataaagatacagatgatgcaacaggagatgatggcaaaacaattgagctggataaaataaatgataatttattattttcatgttgttgtgcaagagtatcttcattatggacaacagtatgtgattgttatgaaaaaacatacacatgtaatcaaaattgtttagaaagatctcttagaaaaccggacagatactatgaagcagttttgaatatttatagaaaggttttaaatttataccctgatagtgaagtttgggttacaggtcattcacttggtggtgcaatgtcatcactattaggtagaacatatggattaccagttgtgacctttgaaacacctggtgaaatgttagcaactaagagattacatttaccaatgccaccgggattacctgttgaaatggaacatatttggcactttggtaataatgcagacccaatttttatgggtgtctgtaatggtgcatcatcaagttgtagtatagcaggttatgcaatggaaagtttttgtcattcaggtatgaaatgtacatatgatacaattaatgaattagggtggcatgttaatattttgaatcatcgtcttaaaaatgttattgataatttattaatgctgtcaaatgaaactgctgtttgtgaaaaacctccaccatgtgttgattgctatgattggacttttgtcgatcataatgaaaataaaagacgcacaccaaaacatccatcatcttcaaccacacctcttccaacctcaacacatgaacctaaaccaagaaaatgtttgaaaagaacttggtatggatcatgttataaatggtctgatgatgatgatgatgatgatgatagtaagagtttatcttatagttacaacatttagttagtgcttttcatttttttgtttattcattttatatttttgttttacattttttatacggttttatacggtttttatacggtttctgattcatataaggttttaatttttatattgttttattttagtttatattataaacattactttaatatacaatttgcacggcatataattttttcattgataaaaatagacacgcgtacacattgcaatttttttttgtttaataatgacgcgttaaaatttccaaaagattcatcgatcaacttctctgttgatcttgttctttatcaatcaaccaatttcatatgtttaaaaaggctaaaagaagaacatacggtcgtcgtaatgctgacgaaccagttacttttttgtcaggacccgatgatcaaactctattgaaagaatatccagatactttatcattttataaacttccaccaacaacagaaatcacattaaatgaatttgaactttatgcaattgatagattaaagattttaatagaaataggtaatttacaaagtcaaggtactaaatatacagatttgattaaattaatgagtgaaagagttaaattactcatgccattacattcaacaaatacacttgaacctgaattattattaaaggaaagacgtaaggatcattattcacattttattcttcgtttagcattttgtagaaatgaagaagttaaggaggaaatttgtcaatgctgaaacttttttgtttaagttgagatattcacaattaactaaagcagagaaaacaacaatttatttccaaattagatctcgtttggggtgaagttagtgatgaagagaaggaaagtcttaaagataaattgattgctacacattataatgatatagtgatgggatttaaacaaggtacattaggtgcatcttcaagttatacacagcgttcatcgtacaatgaagaggatatttgggcatgtattaaaaatgaaaaattaagtaaattaccttggagtgatgtcccagatttagtttctactagaaaagttgtattatttaaaggttatgcatacgtacccgaatttctacaaatgaatttattggctaacgaattttcaaagtttttagaggaacaattattagcaacattaaagttattaccaggtttggatgaagatgaaagattagttcctatcttagataatatttccaaaggttatattcagcagtgaattcacaggatttgcagaaggtgatattgaaaactgattctgaagttcatgctagtaatgtcaaacaatttgaaaaatatttccctgcctgtgctcatagattaatggatggtttagaggaacatcatcatttaagatatacaggtagacaacaattttccctatttttgaaaggtataggattagggcctaacgaagcattgaaattctggcaaatgatgtttacaaatggtacaggtggtataacgattgaaaaatttaataaggaatataagtataatattagacatacttatggtttagaaggtgcccgtataagttataaaccatggagttgttcattaattttatctaaaccaaaaccaaataagcaagaatatcacggttgtccatatagagatttacaaactgataatttaactgcattattgaagagaatgggtatgaaggatgatggtaatttacaaaaagttattgaattaagtgattcaaaagaatatcaaactgcatgtacaaaagttttcgaagttcttaatgctgaaaatatacaagccaacatgagtaaaggactgaatgtcatggaagctcaaatatctcatccaaacgattatttcaatagggcattactctatgaaaagcgtttacatggtgaatctcaagcagattagttaatttattcatttgtaataactttataataaacggtaaaagaagataaagtgtagtatagttttatctccggaacactaagatatgtcggacataaattttcgggtaaaatttttattaagaaacttcgatctcatcctctgacccttagattgttgtttaacctgcaggacagatatatgatctcttcttgtagaagtatctccagtgggacagacacaatgtcggaaactttgttaggctcatcaatatcgaaggcaggaatgccgtttaaattttttagtaagaagtcattcacaatcacctaaacaaccatcacagtttgttccatcaacaccaaacatgccgataggtggtaaacctgtgatatcacccgttacaccaacattgatggatgcctcattcaagggggagagaagaagagctgctgtattggaacagcaacttagagaagttagtttaacagcatctaaagcttatgatacgatagatgatttgaaacttaaaaatgaatcattacaagaacaagttgatcaacaaaaactattaatagaatcatttaacaaacagatagaagatttgaaaaatgaaaaaatccaatttaaaaaacttcaagatgatgagataaaggagaaaatggtagagaaaaagtaaagatcatgaagaaatatcaaatttacgacatgaaaaagatatgatggctatagaaaacgaaagtttgagagatgaaatacaaaagttgaaaaccatgtataatgatatgagtaggtcaatgacatcaagagaagaaagagatactacacaagatgaaatctctccatcaatggaaaatgaatacaggcaaatcatcaccatgcttgaagataagattagagaattagaacaattgttacaaagcaagacgaataactatgagaaatccatatcaacattacagagttcaatgagtgttctcaacgatagcaaaatgttcttaaacaaacgtttccattctactacggaggatatttcaatgtacaaagagtcaaccgaaatgaatttgactttgaataaagatgaaggtgatacttttgttgtaacaaatttgtcatttttaccatgattttttattattattattacttcttcttcatataccagactttttttccatttccgtttctatttgattttcttgtttgtatttgtatctagaactgtatattattttaatcaatgcattatttcattaaacttcttaatcataaaaagtacatcaaattgggagtagtaagtaatataagacacgcggtataattttacttagagggtcaattttgtcaaaacatgctgctcactggagcaagttcctaacttcttttcaacaagcacaatatgcagataataactccagctatacgattctttgtggcatttatactactctgtataaatttgacacatgctgcattaccaattgaggaattacagacctcaattagtgtagaagacccaatttataatgtcagagcaggtgaacttgaaatggtacttgatgatgttaagaaatataatatgattgttttagtaactacatccgaaccaagatatcaatgtgaaatgtgtggacaatttgatccaatatttaaaaaaattgtaaccaatatctacactacatatccagatttaatgaaaaatacatttttcataagagttgaagcatcaaataaccttgaacatttgaaaaaattaggtattaaatcagttccacagatttgggggtttccagattcaagaattgccattggtgaagaaaaatttgttaaagttgaaagagaattaatgaaatataaagctgcaatatcggaaggtactgaatatattaaaccagattggtatgatattgatcaagctggtatggaacattatattatggaaatggcaaagggagattcatgggatgttgttatacaaaaattaacaggatttattagtaatactataaggtttgatgttaataatggcgttttagcaagaactaatgataagaaagctgaatttgattgggttgtctcagttcaatggtttatttatgtttttattggtattaaagttttccaaaagataaaggcaacatcaagtacatctacaccattatgggtggataaaagattttatgcatatatttcaattgtacttatacttgttaatatatcaggatttaattttaccattcaaagacattcaccatttatttcacagagagacggtaaaattttgtggattgcacctcaatcaaatttacaatttggaagtgaaattgcaattagtatattgttacaaatattttatattgttgcattatatgtcttggcttcctcaaatagttttaaaattgatcaaaatataagggatgttatgataagtatatcatgtttagtattgattggattattaatagtcggctcagcaatatataatgttaagagtccgtcatatcctttcaattatttatggtagttttcaaaaaaaggatagaaatttcaaaatatagagaatataaaatatatagcatatagaatatctaaaaacttttgttgtttattaattgttagtaaatttttcgttgatgattagaataattggttttcttctgattcgatttgttcatttttattaatccagtaaaaagaaaagcaaaccaagaaagcaccaagaaaataaattggtgaatttaatttaaatttaaagaatatatcacaaatcaatgccaatggaattgttaaacataaaccaacagtaacagttaatggggaagttaaaagcattgctcttgcccataggaaatctgctaagaatgaaatgatacaattgaacaatataacagaccatacataacctgaagatggtaactcaaaatgttcaatatctaagtaatgaactataactaactgaaggccatagtaagaaggtattgaaaacaccaacaaacccaaaaaataatttcatatccattcttgaatcatctttaacttttaatttgagtaatattgaataaataccataacataaagctcctaataaagccagtatatcacctgttaatatatccgtaaatgaatatgaatcatttgtttgaggtttatcatttaatgtaacacataaaactccaataaataaccctataagcgatattattttagttttgtcaaaagattcctgactaaagatataaccaacaatcattgtgaaaaatgatgaagttgaagataaaatagtttgagaggagactgatgtgaatagtagggatgcattattaaagaaatttgaagaaaaccaaagaatacaaaatgaaaatgataattgtaaagtttctctaaatgttaaaggatgcaatttattagaatgtaacagatttggttctgaatcattattatgttcatgatatgaatgaatgtaaggattattgttgttatttagtaaagaattattgatattattattattattgattgtataatcattatcatcattattaatagttgtatcgataaatggtaattttaaatctttatttatccaagttttgaaataataaggaatgaggtaaaacacaaatgaagcggtattaaaccaagtaataaagaaaggtttactgtaaatacctttttcaaataaatcattaagtaaaaatgaagataaaacccataaaaccaccacacaacagaggaaaaacaagcctaaagaccattctttcgatcgtttggaagcctcagacgatcccggaaactctagaatagccatttgatgaaagaatctgtacttttgactaaatttaatggcaaaattgataaagataaaagcattaaaacatgcccatgaaatgaaatttgataaagggtatagtagaagtcaaaagacctaaacgaaatagagacgcgactgtgcgtcattataatttttcaattttcaaatatttttttttctggacgaacagtttttgcggagggtttactcttactgaaatttcacttctgaagaggtgatagtataagggcaagacttgtgtgcttttaataggtaaaggtaatgtggttattcggaggttcatcaaagaaacaagaagataatacagttgttgcatcagctccatcatctgaatttgtatcagagaaatcaaatacaccagaaataacgaatagtttacaatcatcatttccgacaattccaacatttgatgcaagtaaacttcatccacttgcaggtttagataaagaattagaatatcttgagttagatgatgaaaaattaagtactattaaaggtacaggtaatggtattttaccatctcgtggttggtcagatgatttatgttacggtacaggtactttatatgttagtggtttaggacttggtggtttaattggttttaatgaaggtttaaaaaatttaccaagtggaagtattgatcatgtaacaggtgttgttaaacctgctccatttaaattaaaattaaatacagttttaaatcaagttacaaaacatggtcctcatatgggtaattcagctggtgttttaggtttattatataatattattgattcaagtttggatgcttatagaggtcaacatgatgatttgaattcacttttatccggtgccttagcaggtgcaattttcaaaagtacatcaggtattaaagcaatgggttatagtactggtatgatgacattagcagctgcaacttggtgtggatttaagagattaatcaattaattttaattttgaatcaatataatgatatactatataatcttgtgcatataaattattttataattataaactaaacaaactatttgaaaatatttaaagaataatgcctatacttgtaattttatcattttttccatttgacaacaattaaacagtaatgtgaatttattagattaaattcttcaatttcatctaaccattcaagtgatgttaatcttttattttcctcacatgttatgctattctcataaacccatttcatatcattacaccaaattgagaaattatcatcattataattttcgaaaattttcttgaaacgttcaatttgtaattcaacgctattataaaccatcaaacttggcattttcaatcctctagaatttaagttattgaccataactttaccataatttagattatcagtagttgaaccaccgattggttcataaattgaaaattcagatgatggatttgtaacaatattatttttccaaaaattaagtaaattgtctgcatcatcaacggaaagataacatatacaacattcacttataattaaagttggtacatttgtatctatttgttgaaattgttggaaatctgaaagtttcatgtttgatttaatttgctttaaatcaaatggaatcaatttataattaggtgtggataattcagggttaaatgaaagtacatcatttgatgtaattggtaaatcttctatgtttaatggatttatccccactttttttgataatattggtgatgattgaatagctaaagattttaatctagtagtttgttccatatcaagttcaaaatacattaaattaccatattgcggaattaattggaaaggtcttgtatcattacctgcacctagagatattatttgaattttattagccatctcgtttgttttgataaaatcattaatcttttcatttattgacattgtacgcaaataagtacctctattaatcattggagatttcaaaggtgaaaatttattaatttttttaaaatatgaatcattatttgtatttaatatagtatttatatcaatatgagataattgaaataaatcgaaaaaagttgatttaagtttccttcgtaatgaatttcttaagaatgtattctcaattgataatagattgtagtaaagtaataaaggtattaaattaagaatatattcatcattaaaatattttttcatatgacatgaaagcctagaggataatgcatcataatcagtttgttgaattgcatcttcagacgagtccattgtgattgaacaaaagagaaaagatagtttaatgcaattccattttatgatcccggtattaataataattgagaaatttcatgtaatcaaccatgacagaaactgctgttgtattgcacgtattacataatcaataatgaaaaaaaattgttggtctgagaaagttgacgtcagaggacctcaattaacgacatctttaacgtgtattgtaagcaaaattgtaacgtttaatatcctttcatatgaacttctacgatatggatgatgtcactgtagttaatgttgaataactattaacataatataagtatctcaacaaagattgttgatagtatgtagtctattagtgtgaacttaatgttatccacctccctgtaattttcttggaggctcagctgttaaatattctttagaaagaagatcaatttttcactgacacatagtatgtgtagtataccattttgtgtacagggaaaacaacatagtaatctacattacaagtaaatacatacaacataacaaactcacaccctatataccgtatctactatctcatcagataaacctacatgttctacaacattccaaacaccagcaccccatggaataataaaataaaatcgatgagccgtggtcaaaagcgctggcagtgagaaaaaacttgttggtcccaaccatactaaattgagagattcggcgctattactttttataaatacacattacacgtctttaaatggtactgaattcttcaatgtaatcattttctgagtttttgtttgtagtttatagtattcctttttactttgatacttcttgatatatccctttttttatcaagttgcttggactccaaagctttttctttacttactaaccaattcacaaaacaaacaaacaaactaacaaacaaacacttttttagttagtgaattaagaaaaatcattacatattctaagtttacttatttgatctattatattatattactactcaaactacttatattatattatttcattctattttttaaatttgtatctataaaacaaattaaaaaataaatctactaaattatccaattgcttattcaaatttcaattgcttaattttacattcattcaattaattaattcatatcattcctttgatttttgaattctattataattttcgattacaattgcacattaaagttatattttaacagtgtttttacggtacgtatcattttttatttatttattatcaattttattttccaattgacaattttttgtaatttccaatggaacttattattaccaatcatgttttcttttcaagaatctaaagtcacttatcttctcattcaatcatttatttcagcttgccattaattttaaatcatcttataatcaagtttttgaaatccaacatttttcattgtgcagtacaattaacttttcatcgcggcccaatttttattcaattgttttgttcttattgagcgttgttgaaaacagttcaatctttagtttttaaacagattaaaacttacttcaaatacgaaaagaataagcacatttgaaatcaaactgatttatttatttactcacataatcaaaagagtgactacatttccttataagaaaacttgattaagataataataaattccatgaaatttcatatatgaatgaaactaacattccattattacagattttcaaatagaattttacatcaatcaaataaatttttaacttattcatcaacttataaatttacaaaatcatcatttattattcaaaattatagaatgtctacagtttcattaaatgaaaaacataaatctttaactacaaatttcttaggtttaaatactattgataaagctgaaccatccgctttaaaagattttgttgttaaacatgaaggtcataccgttattaaaagagttttaatctcaaataatggtattgctgctgtcaaagaaattccgatccgttagaaaatgggcttatgaaacttttggtgatgaaagaactattcaatttgttgcaatggcaacaccagaagatttagaagcaaatgctgaatatattagaatggcagatcaatatgtcgaagttccaggtggtactaataataacaattatgctaatgttgatttaattgttgaaattgctgaaagaactaaagttgacgctgtttgggcaggttggggtcatgcatctgaaaaccctgatttaccagaaaaattagctgcttcaccaagaaaaattatctttattggtcctccaggttctgcaatgagatctttaggtgataaaatttcttcaactattgttgctcaacatgctaaagttccatgtattccttggtctggtactggtgttgataaagttattgtcgataaggaatctggtttagtttctgttgatgatgaaacctatgctaaaggttgttgtacctcaccagaagatggtcttgttaaagcaaaggaaattggtttccctgttatgattaaagcatctgaaggtggtggtggtaaaggtatcagaaaagttgataatgaagaagatttccttagattatatgatcaagcagcaaatgaaattcctggttcaccaattttcatcatgaagttagctggtgctgcaagacatttagaagttcaattattagctgatcaatatggtactaatatttcacttttcggtagagattgttctgttcaaagaagacatcaaaaaattattgaagaagctcctgttactattgcaaaatctgaaacttttagagaaatggaagctgcagctgttagattaggtgaattagttggttatgtttcagctggtactgttgaatatttatactcatttgctgatgataaattttatttcttagaattaaacccaagattacaagttgaacatccaactactgaaatggtatcaggtgttaatttacctgctgctcaattacaaattgctatgggtattcctatgaacagaattagtgatattagattattatatggtgttgatccacatacttcaactgagattgatttcaattttcactaaaccagaaagtttacaaattcaaagaaaaccaactccaaagggtcattgtactgcttgtcgtattacttctgaagatccaagtgaaggttttcaaaccatcaggtggtactttacatgaattaaatttcagatcatcttccaatgtttggggttatttctctgttgctaatcaatcatctattcattcatttgcagattcccaatttggtcatatttttgcatttggtgaaaatagacaagcttctagaaaacatatggttgttgcattaaaggaattaagtattagaggtgactttagaacaactgttgaatatttaattcaaattattagaaactccagatttctctgaaaatactattacaactggttggttagatgaattaatttctaaaaaattaactgcagaaagaccagatcaaaatatcgctgttatctgtggtgctatcactaaagcttatctacaatctgatgaatgtaagaaagaatatgtttcatccttagaaaaaggtcaagttccatcaaaggaatcattaaaaactatcttcaatgttgaatttatttatgaaggtatgaaatataaatttactgttgctaaggcaagtgaagaagattttactttattcatgaacggttctagagttttcaccaatgttaagtcattatctgatggtgggttattaattgctattggtggtaaatctcacccagtttactggaaggaagaagtttctgcgaccagattatcagttgatggtaaaacttgtttattagaagttgaaaatgatccaactcaattaagaactccatccccaggtaaattagttaaatatttagttgaagatggtgaacatattcaagcaggtcaaccatatgctgaagttgaagttatgaagatgtgtatgcctttaattgccggtgaagatggtactgttcaagttttaaaacaaccaggttctactgttaatgctggtgatattttagctattttattattagatgatccttcaaaggttaaacatgcattaccatttgataaaactttaccagacttttggttatccaatggtttcaggtaccaaaccagttcataaatttgaaagattattaaaggttttaacctcaattttaagtggttttgataatcaagttgttatgaaatcaacattaactaaattaattgaaactttaagagatgaagaattaccatattctgaatggaataatcaagtttctgcacttcattcaagattaccaatgaaattagatgctcaattaaccgacttaattgaaagaactcataagagaaaggctgaattcccatcaaagcaaatcttagcattgtttgaaaaaactaaaaaggaagaaaatgttgatatcttatttgatcaagttattgctccattacattccattgctactagatatgaacatggtttatctgatcatgaatacaatgtttttgctggtttattagaagaatattacagagttgaatcattatttgctggtgacaatgttagagaagaagatgttatcttaaagcttagagatgcaaacaagaatgatttatcagttgttatcaacaccgcattatctcactcaagaattgcttcaaagaataatttaattattgaaatcttaaagaattaccaaaccgtgttaaagaactctccagctgctgttgaaatcttcaagactccattaaagaagattgttgaattagatactagagctacagctaaggcaactttaaaggcaagagaaattttaattcaatgttcaatgccatcaatcgctgaaagaactgaacaaattgaacatatcttaaagacttctgttatttctgctaaattcggtgaaactggtgttccagaacacactttaccattaatgtctgttattcatgatatcattgactctaaatacactttatttgatgttttgactccattcttatgttcaactgatccatgggttgctgctgcagccgctgaagtttatgctagaagagcttatagagcatattctgttcaaggtgttactcacgaaattccagaatcatctaaagatactccaattttaaaatggagtttccaattaccaagtttatcaacttctgcattcaacgccgttcctgaaaaccttaagaggtgatgactcaatcaatagagctgtttcagtttcagatttaacctttatgattaataagaatgattctcaacctgttagaactggtgttttagttgcttccaaacatttagatgaagctgaaagtgcattatctgctggtttagaatctttagttaaagatttgaaaaaatccaactgaattaatcaatgttttcaatttattcgttaactcaactgatggttatgaagatgaagctgcaattttagcaaagatgaactcaattgtttctgattacaagactgaattaaacaatactggtgtcagaagaattacttttgttattggtgacaaattcggtacttatccaaaatacttcacttttaagactttaaaagctggtgaatcatattcagaagatcaaatgattagacatgttgaacctgcattagcttaccaattagaattaggaaggattatccaactttaatattaaatctatttcaactgataacagaaacattcacgtttacgaagcatctgcaaagaattcatcaggtatagataagagatactttaccagaggtattgttagaactggttcaatcaagagtgatatcactgcatctgaatatttaacttctgaagctcatagattagtttctgatatcttagatcaacttgaaattcttgatactactaatactgatttaaatcatatctttatcaatttctcagctgttttcaatattactcctgaagacgttgaaaatgcatttgcaagtttcttagaaagatttggtagaagattatggagattaagagtcactggtgcagaaatcagaattatgtgtaccgattctaagacatggtgttccattcccattaagagctgttattaataatgtcagtggttatgttgtcaaatctgagctttacatcgaagaaaagaatgcacactggtgaatggattttcaaatctattggtgttccaggttctatgcatttaagaccaatttctactccttacccaactaaagaatggttacaaccaaagagacaaagagctcatcaattaggtactacttatgtttatgatttcccagaattattcaaacaagctttagcattcatcatggaaggcttatgatccatctatcaaactcaccgattctttcttctcttatgaagaattaatcctggatgattcaggtgatgctactccagttactagagaaccaggtgctaacaatattggtatggttggtttcttagttaccgcaaagaccccagaatatccaaagggtagacagtttgttattgttgcaaatgatattactttcaagatcggttcttttggtccacaagaagatgcattctttaacaaggttactgaatatgctagaaaatttggtattccaagaatttacttatctgctaactctggtgctagaattggtattgctgaagaattactgccatactacaaggttaactggaatgatccaactgattcttccaagggtttctcttacttatacttaactcaagaagatatggactgacttagaaaagaagtggtaaatcatctgctgttatcacttctaagattgtcgaaaacggtgaaactagatatattattgataccattgttggtatggaagatggtttaggtgttgaatgtttgaaaggttctggtttgattgctggtgcaacttcaagagcatataaggatatttttactattactttagttacttgtagatctgttggtattggtgcatatttagttaggttaggtgaaagagctattcaagttgaaggtcaaccaattattttaactggtgctccagctattaacaaattattaggtagagaagtttattcatcaaacttacaattaggtggtactcaaattatgtacaataatggtgtttctcatttaactgcttctgatgatttagatggtgttgagaagattgttcaatggttatcatacattccagctaagagaggtgcacctgttccaatcttagaaggtgaagataaatgggatagacctgttgatttcaaacctgttaagaatgaacaatatgatgttagatggatgattgaaggtcgtgaaactgaaaccgggtttgaatatggtttatttgataagggttcattccaagaaactctctctggttgggcaaagggtgttactattggtagagctagattaggtggtattccaatgggtgtcattggtgtcgagactagaatggttgaaaacttatacccagctgatccagctaacccagattccactgaattcttagtccaagaagctggtcaagtttggtatccaaattctgcattcaagactgcacaagctattaacgattttaaccacggtgaacaattaccattaatgattttagctaactggagaggtttctctggtggtcaacgtgatatgtacaatgaagttttgaagtacggttcatttattgttgatgcattagttgatttcaaacaaccaattttcacttatattccaccaactggtgaattaagaggtggttcttgggtcgttgttgatccaactattaacagtgatatgatggaaatgtatgctgatgttgaatctagagctggtgttttagaacctgctggtatggttggtatcaaatatagagaaaataaattaattgatactatgaacagattagatgatgcatgtaagatcttaagcgcaaaggttgaaaaagctgcaactgaagaagaaaaggctgaattatcaaaggaattaagtgcaagacacgctaaactattcccaatttatcaacaaatctcagttcaatttgcagacttacatgatagatctggtcgtatgttggctaagggtgttattaagaaggaattagaatgggttgaagctagaagatatttcttctggagagtcagaagaagattaaatgaagaatacttaattaagaagatgtctgaacaacttccacattcaactagattggaaaagactgcaagattaaactcattctacccatctaccattgaagttgataatgatcaagatgttgctctttggattgaacaaaaccacaagaccttagattctcaattaaagaaattaaagggtgattctgttaagcaaactttagctaaattattcaagagtgatatcaagaacaccactcaaggtttagctgaaattatgtctttattaccagctgatgaaaaagaaaagattttaaaattacttaattaagaagcatcttcaatattctttttaaattcttttgtttgtttgtttggagaatttaatagtttagttttacatatactttttattctttcttttctatcatgaggtattacccatttcttgcctatatataattgtttctctatttttattttataatttatgattttaattttaacacatgtttgtatttatttaaattcctgtaatcttgcctgtaaccaatcctatcaaaaatgcaagaacctgatacaaaccttcccgcgtataaaaacatcaaaacataaaactttgttaacttgacgagcctcccaatgttgaaacttcaacaagcttcatattgcccttttgctctttcatctttttatgatgaggttattactctctctctgcttcttgaattgctttatttatcatcttttgaatcattgctttaatagtaatacaatttttattcaaccaataattttgtatcaaacacacaccctacacttaacaccaccccgtacatagccttacactagatccaacttagaccacttaataaacactaaaaacacacacaaaaaattttatacttttttacttaaaagcagaaaaatctacacaataacactcaagacatgaaatactcacttactttaacttttattctcctttgtcttctttcacttgtaaactcatttcctcttttcaataaaagggaaaaatacattattcagctcaaaaagccagattctgttgaaattttatgtgcacaagatgatagcgtcaaatcattttcacacttaagaaaagagatcaaaaaggttttttcctttggtaagtttgaaggatttatgggcgagttttcaaaggatgtcattgatcgaatctctaacaatcctttaattgaaaagattacccaagattacagcattcaagcatttgaggatgttgaaattcaagaaaatgcaccatcgcatctagtcagattatcacaagagggagcagttaatgaagacgaagaaatgaattattatttctctgacgaatatcaaggcaccggtgttactgcttatattattgatacaggtgtttatgttcaacatcctgaatttgaaggcagagcaacacttggtcctaattttagtactgatatgagaaacatagattatattggacatggatcacatgttgctggtgttatgggagcaaaaacgtacggggtagctaaacaattacaaattcattcagttaaagtacttgatagaaatggtcaaggctcattatcatctgtcatttcaggcttggaatatgcagtcaaccatcaaagggaaactggcacaaaaggtattgccaatttatcattgggagcatccaagagttcagttttagatgcagccgttcaagcagcgtatgattctggattattagttgttgttgcagcaggtaataataatatggatgcgtgtagaacatcaccagcaggctcatcatatgctttaacagttggagcagtggatgataaaactgatgaaattgcacatttttcaaattggggtagttgtgttgatgtttttgcatctggtgttgatgttgtaagtttaggtaatggtagattgaataatattcaaactttaagtggtacatcaatggcgagtccaattgttgctggctatgctgcaacattgttagaaaaaggtgtttcatttgatcaaattccaaacgagattaaaaacacagcagtctgggatgcaattccttcaactagtttgagaattagatcaggaacacctaatgttattgtaaacaatggatttagtagttactcgtctaacatgtttaaatctgataatattacagaaatcgtcctctgaacagtgtgtaaatgataactttgttttttataaaaagtataaataagtagagtcaaagtgtagtaaaaatacataggagagtaaaatcatatatacaaaagtaaatatacaatttcaataaaaagagatctaaaaagattgaagaaaaaaaaagtaaaatcagtaacgttttagtgtttattaatctatagtatgagtattttagatttgttaaaaatcataaatgacatgaatgactaaatgaaataaccaaatcaccagtactagtatcataatttagacataattgagaaaatttacattccacaggaacagaaatattttgattttgattatcatttgtttgaagatttaaagcttcaggatctattgcagaatctgtaaatgatacagatgagtgatcagaagcacattttaatacttttttcaaaattgtactattgttaccactcataccatttgtaccatttttattattcgctttatcatcatcagtattttcactttcatcagagtttggtaataaaaattcagaatttgtaatttcattaattgacacaacatactttctgtataataattttaaaacattttgagatgatttatcatcagagagtgatgattttaataattcatttaattgtatattatccataaatataatacgattcaagtcttgtgttttgtttaatttaagtatcactaaataatgattaaaatctttcagaattgattgtttattttcacaatcataacaaatttgtttacctaatctatcttttggtaagtttgctctacaagacaaacataaattttgttgaactggagaagtataatgctggggaattttagcaattgaagcttgatcatgatgatattttgctaaaaatgataattgaagtaatgattgttgttcagctgttaaagttaatggatttaattttggatcaattgataaaatattaaatgagaaaagttgttcattataagctaaatcaacatcagcattttcatcttctaagggaatatcagtattctctaataaagcaaaagtatctaagacttgattttgtagaataattggatcattgacgaaattattctttactggagtcatattgttcttaaattggtaagtaccaggtaattgatttgataatttcatttctcttgaaaaagttggaggtggctgtttacttggtataaccatttgtattggagctgaagttgcagttggattaaattgttttgttgttggctgatatgttttcgaagttgatttcaaatgttctgccagtttttcaatttcttctctagttggatttggtctatgacctgcacttgcatcagcatttaatcttctctttgcttgattaaattttttttgatcacgttcaatcatacgacaacggaaacatgttttaaattgcaaatgatctggatcttcatcaagtgttctcttcctcttacaacgacggcaagtggatattttaccattaacataataataaatattggtactactcataatttagtgtgtgtattgggaattgtaccgcgagttctggaaaagttgaagtggctgtttgtagtagttaaaagggcgagaattgaaacgctgaatataatattggtgattattaaaagttcctcagctgatgtgattgttcacttgtcactgcagttgttgtaggcttgctttgtagataaacaaggggaaaaagaagagaagtgtttgattgttgactttctttctgattaattgcaagagggcaaataatttttgcttgcaatttggttcttccgtacacctttttatttatacattttctataatctacatactaagggattacgtaatgttctacatgttatatatcaagcttcactacattcccaggaaccaacattatcaaagacaacaccacttaatatacatcttctcaatgatggagttagttctccaattgcatcaacatattcttgcaaaaaatgcgcaacacatttagtcacaggtggaaatgctgaggacatcgaaattgcattttttttgatgtgtaataaggtatggagctgtatggaaatcccaataatgttttaataatggatatttatcaatatttatatcttgtgaatgatgtattcttgatgataacactcttgcaacatttccaatcaaaattggtgaaatcatatctgtcatatgactcttaatttcatcataatattgatgttgtgtaatatattgatcataaagtggtaaataatcttcacaatgattacattgacatccattccataacatgttagatatcatttgttcatagcatgcgacagattgaacaaatgtcggacaaataaatgtttctaacccagttaatgatggtaacatattttcaaaaatttcctttctgtgtaaataattaccttcaagtccatgatcaacattaaaatcaaccggtggcatatgtctaattgataaatatttcaaattcttattatttgggtatttcttaaggaaatctgcaatgacgaaatcaaatgcttcagtatgattatgatctctatgtattgttctctgaattattgataatttcttgatgttgatattatgagaaattaacgtacttaaaaaatcatgcagacagttgcaaataatatcattacaaccaagaacaagttctactttatctaactttccaaaatctattttctttaaaaattgtaaaatttcataagttggatcttcaaattggtgataaaatattagtttaagattctttagttgtaatttatctgcagtaatggatgacttggtcaacttctctatgaatttagactgtccgaacacattttcaaaaatcagttcatcaaggttactaataaattttataaagaaactatcatcaacagtatctaaatggccgatcttatcagttgaaattttgagtttcttaacggaatcattaaaatattttaattcagtttttgaagtcagttccaaacttgtcacttgttgttggtaattctatattatctggtactttaacattaagtaaatctaccgatttcaaatttggacagtttttaatcagcaatgtaaataaatcaacagatactaaatcttgaagatcaacttgttgttttttatcaaataaaaatccatcgataacaatattttcaatatactcacataattgagtgttaacactcaatgattctaataatatttgttgtcggaagattataaattttgtcatttaatttctctgttgctaaatgtgtctctaatacacctaataatgtataattagattcttgaaaagaatgtgaagatttaagttgagatgattttgtgatgtagatattcttgtatagatacggtagtactgaacaggtaacaattatagttgcagtaaagaaggttgattttatcttgttggggcagataacttacttatattagagatgaatacttttcggtagtttctcaagagtgatactcattctctaatattgtatatttttagtcttatgtgtctatatgtcaattgtttttgaagtaggatactccgtaaatgattaagtgatctctaattgaagagatacaccaaaaaagcttgaagtaaaacgttcgcatgatgattttcccaacaaattgtgaaggttatttgatggaaataacggtcaattttgttgcaactctttgtatataccgcttacactccttcttcatgtacacttgtctctactctttctctttcatgaatacctgttctcttactcattgaattcactgtcccagtggtaatattttttacttagtatagattgatcgatgaatcacaggcggctaaattgcctaattgggcaatatatcggatttgaatctgacagttttcaaaatttttcaccaccaaacccgatatctttccatcaaatatccactttgatcgttatcagtgaataatttgactcattgctgatattattcactttgacgatatatatcaacaacttctacttctttttttcaattcttataagttgtgaatatatcttttcaataagaaatagaatatggaaggactgatagacaacatagcagagacaaaatcagtattaagtatacaatcacatgttgttcatggttatgttggaaataaagcatcatcattcccattacaaatgcttaattgggaagttgatctattaaatactgttaatttgaagtaatcatacaggttatggatcattcaaaggttctgcatcaacaaaatctgatttattaactatttttgaaggactgaagaaaattaacgttgaatatgatgctttattaacaggttattcatcctggttatgataccttggaagctgttggtgatatttgtatagatattaaaaataatgaaaaatcagaaaaaaacgttacttggttattagatactgttatgggtgactgaggggagtactctatgttgatgaaaatgttataccagtttataaaaaattattagagagtcaattagttgatattataacaccaaatcaattcgaattggagattttactagatcataagataacttgtttggaaacattgaaaaaaggaatgaacttgtttcatgaaaaatataaggttaaacatgtcatactttcaactttatatgctgatggtttccaagaattagagggtgggcctgaaactttatattgttgtgtttcttcaatatcagtacctgataaacttatattatacaaaatagataaaatcgatggttattttacaggtgttggtgatatgttttcagccttattattagataggatcactaaattgaatgatataataccagctaccaatcaagctttaagtgtaatgaaaaaagtattaactgttacaaaacattttagtggaaaatcaggttcaattaatgatgccaatatgaaagattgtgaactccgtgttattgaatgcaaaaacatttacaatgataatgaagaactttatcaaccaatatttattccgaaataagtgtgtgttttatcatgatattaagatacattcatcccattctaatatctgtacaatgatttatagattatttaatagagacaaattaaacaataacatttacatagtttaaactgcaactgcatctccaccatagtcttcattagttattacactagttgttgatctatcaaatctggtatctacatatgaagtttcaaaatcttcattttcttcctctctctcttcttctaaatcttttaaaattgtaccattcaattttttattgaaatttagcttacttattttttccaaatcaaaatccacactataatcaaaatttcttgattcattctcatccaacaataaatcatcattattaatatctttaacatttctttcatcttccttttcaaagattgaatttagaatcccacttcccatttgaaaattacgctgttaaatttgtttcaaaaaatgtacgtcctttagatacaatattacttttttgaatgttattggtgatgtgattaaatgtatcagacatttgcttttgtgttttagcaaattgttgtgcattaaccttcggtggattaatcgttatattcattatggaggtagattttttcagtgttgatgcaacatttgttattttattaggtgatgatggtactgacccaaaatcatctgtcataaatgtttcattagctgcaatatctgcaaatgctactttttcatatcttttctccaattgtaatagttctgcctttgcattctttaaattttcagtgatatctaaaatttccctttgtttggcagccatttggaataaaagttcatttgaatcatctttatggacttttttctcctctgttttattaggtgttggctctttggtagttgttaatttagcattaatttgttcttgtgtttccgatttgagatcttcatttaatgccgagctattagcaaattcgaattcattgttttcatcattggtattgtgattagtctggtttcttgatagaaaatttgataagtccagttgattcacttattactctttccttcacaggtttatattctgcatttgaattatttaactgattcaaagctgaatttgataagatagataaggattgttttttgttaattcttcgaggtgaggtagttgcagacattctaacttatttccttactatatagaacaaaaatatgacatgtaacaaatgcagtttttacgcatattaatttcttaatcattaataaattaaattggaatctgatgtatttttcattatcattactcttttaggcaaaacataaacaacattaaaaatattacataagcaaaccagtgcaggtcacgtgatacaatttttagctcagttgcacgtgatcttaacattttcaaagtataaaatttatcccaaattggcaactgtggcttaaatcatgaatttattaggaaaattgcgccacaattttgatttaacgattccctctttaggtgaaaaattacataataaacctaaactttcatcattattaattgaagcttaggcttatatagcatataaattattaagtaacaaatgaaaactgatctccgacggttgacagttagattcaatatttttcagattttccaattttgaaacttattaaaatgatttgaattcccaattttcaattattttaaataattttacttctttttgataatttaattacttatatattttattaagtagttctatattacagtagtacccctaaataataataaactcaaaatgttaactcctcacggtggtattttacaagatttaattgaaagagatttcccaaagaaggcagctcttattgaagaatctgcaactttaaaatcaatcaacttaactgatagacaattatgtgatttagaattaattttaaatggtggtttctctccattaaccggtttcaataccaaggctgactatgaatcaatttgtgataacatgagattagcttctggtcaaatctggtcaattccaattacccttgatgtatcagaagaaactgcaaaatcattctcagaaggtgaaagaattgttttaagagatccaagagatgatgctccattagcaattattactgttgcagatgtttataagccaaataagcaagaagaagcaaagaaagtttttcagaggtgatccagaacatccagctatcagatacttacttgataccgcaggtgattactatattggtggtgaattaggatgcaattagtttaccaaaacattacgattataccgaattcagaaaaactccagcacaattaagatcagaattccaatcaagacactggaataaagttgttgctttccaaactagaaatccaatgcacagagcacatagagaattaactgttagagctgcaaaggataaacttgcgaatcttttaattcatcctgttgttggtttaactaaaccaggtgatattgatcatcatactagagttaaggtttaccaagaaatcattaagaaatatccaaatggtatggcaagactttcattattaccattagcaatgagaatggctggtgatagagaagctgtctggcacgcaattattagaaaaaattatggtgcaactcatttcattgttggtagagatcacgcaggtccaggttcaaactctaagggtgtcgacttctatggtccttatgatgctcaaactttagttgaaaaatttgcaagtgaattagaaattgaagttgtcccatttagaatggttacttacttaccagatgaagaaagatactcaccgattgatttagtcccagcaggaactaagacctgttcaatttcaggtactgaattaagaaagagattaagagatggtactgaaattccagaatggttctcatatcctgaagttgttaaaattttaagaactgcacatcctccaagaccagctcaaggttttgcattatatttatcaggtttaccattctctggtgttcatgctttaagttatgcattacaagcaactttcaatcaatttccaagctggtagacatattactttaattgatgatagtaaccttaacaaagaaagtttaccatttgttgtcagtgaattagtcagatccggtgctggtgttattattgcacctgcaactgatattttagatgctgcacaatattcaactttaaagaaatctgtatctaaggccggttctttcattacagtttccattgatactaaattagatgtctgtaaggctaatgatagatcaggatttttctcaactgaagctggtgaaaaagctgtctcaatttaccaaactattgaagatgctgaactttctgctgatttaactgaacattattcaattaatgttgcaattcaaaaaattgttttatacttagaagaccaaggtttcttcaaattctaagtatttttctgtccatatagcgttattttctagtaacctctctcttcattacgatacctaccccattctttatgtattttataaaaaaattcctgttttaaaaacattaattaattagttttagtggaaacccattagcatcgatgatagtttgcacagccaccaagagtgaaagaaacgcggctggtgatgatgatccacgtactatatggcaaattttttgttcaggtttttctacgctttgtttacatttcaatttcaggattatttcaagttttttttaactaaactaaagtgattgttcataacacactttctaaaagaacaattacaaataaaaaagaaaagaatcagtagaagaggtatagaatagaaaaatggtagttgaaccaggaattgagcagtttgcaaaatgacttacttgatattataaaaagtttaggctcatcagttttcaaaaaaaatgtgacatatcaagtaacagatttgaaaacttttatccaacaaccaaatgtgaacataatttatttaataaataaaaagaataatggtatgtaaataacattttactgtcaaatttagagaacttggatactaacacttattaaatacagctatactaacaattgataaaaatgatcatgaaattttaaaatcaactcattcattcattgcaataattaaaaaaacaaaagaattaattgaaacacaaagcttaaaagaacaattattgatacttactttccctacagatccgaatgattcattatcatatggaattgaaaatataaaatcccttctagaaaatggtgtaggatcatatatcgaaattcttcaaaacagtggtgtattgaaagaattgtcccccattgtgattgataataccaaagcaaaggtaaaccaattgtcgttgtatatacaaggactgaaacaaagtatacatgcacctcaattattatcagatttacctcaaaacgtgaatgattggatcgaagctaacagaggtagagatatcgatacgatcatcgaagagatggatcaacaagaagaaaacacatcattaataaattccatgcaatcagcttgttaataggtgggtcaaacatgtacaatatataataggactgacgcatgatatactgaatggtatatctgaagaaatagtttttctaacagcaaaagaaactgcattgaaatcgctgaactctcaaataaactcaagagaagtaaacttggttctatcatttcttcgagctaataaaaaatcacatgctgcaattttactgctgtccaattctaccatagatgaaaatttgaaaacaacaatttcaaataatgattttttgaaagggttaaacattgaagctcttaaatctgtacaatcgatagctgatctaaaagatgtaacaaatcaaacatttggtggtttcaaaagattgaagttttctaagtattctacagacaaatttgtcattatacttaaattaattactacccaatttgatattaagttgattgaaattatcacaaaaaataatttattctcaacgagaattgatgatttcgatgagattattcaaaatactgaagaacttctggatgtgtatgataccgatctcagaatttgtatcacgctgataagagaaatatttagaaaacaaggtgatgttttccagccaattaaaattgactcacatctctacataattgaggttttgaaagagataagaaaggtaattatattccatgatgagtttgataaattgatcacaacattaatgtcagatattgactcgagtatcgaagaccaaattcaaacttatgaaaaaatgttcaatgaatcacaaaatgcttataatacattagttcaatgcccacagaaagagctttttgacaagaattttgaaacattaaataaacaaaaatcggatttctaccaaaaaatttctttcatagaaaagaaaattgttgatataataaagtcaattcttttaaaagttaaagatgattattatttattgtttgaattatatcaaaaatttgagtatattttgaacaaaccacaaattagactggttactcaagaatttcaatctattttactacacgcaactgaacaggaaattaatgagctggaatatcaattcaaatcacaagtggagattaaaaagctaatcagatcaagaaatttgccaactttcacttcttctattttatggacaaagcaagtggttggagctatgtcgtctattttttctcatcttactttaattctgacaaaagattggaccaattatcctgaaggtagaaaatttgcaaccagaataaatttgcttatgactgagattgatgtgaatgtattgttaaaagaatggctagataaagttactggtcgtgtggaaaatcttttcatgcaagatgaggttatcaaaattgttgaacatgatggaatatcaaactatctggttaattactccgaatttgattttgaactatgttcagaagtagaatgtttacgttatttgaagttctccatacctagtaacgttgtaagatattctcaaaagctcaaacttttgaatgtgtatgctaaaagtttgtgtgaaattgtggatcagtatgaagatgctaaaaaggagattgtaactttaacagatttgcaaatattagtatctgctgatattgaaaaaattaaatctactctgacaaatttatcttataaaaaatggtctgatatttatcaaaatatagaagttgaaaattcagatgtgtcagctgttactactaagaagatatcttttgtcaatcagctacaatcatttgtcgaagaattactatttaagatatcaaaattaaaacaatatgagaaacaattttatgaaaagttcaataaactcgagttttgtgattatacccatgagaatattaaaacaattattggcgaaattcaatctttagttcaagaagcaatatcacacaacttttcaagaacttccttgcttgttgattttattaactctaaaattgaaaatatattacttgaaaaactaaagttacaaatgagtttatttaaaaggcaatgggagactgatgggcttgacttttcgaacgtttcccaagttcatgaatcttactattcaaaatatgtcaattttggtgagtccgccgctatcaaactcaaaggatttatttatcgccaaattagatagccttatttctgttgttaaaaatcaaaggcaaattgtcagttcacctttatctagtgatacagatttagagaagttcacgatccagcgtgaagatattattttgacgtataaaggtataatttcgattattcaaaagaaatatgaacaagctatgtattatattgagaagtgggattctttgcaatttatttgggatatcaagctcaatggtatgatccttgataaattcatagcatggttcaacttgttttctaaaatggatgaagctattttgatttttgatacaattgaaacttataaaatatttggtcttatcaagattaacactgaacaagctcaaatgagaatatacagtcaattcaatatttatcaaaatcacataggagacttgttttcacaattcttgtttgatgtatcaaactctataaataatacagttgagacacatcttaacaatataaaagccagtaactttgatttaaaggatacaccacaaactgttgaaaaacttaacattctgagttatatacaacactacttatcagataacaaagccaattttgaacatattaaaaatggttatttggcgttacaaaaaatgagatttgtatttcctcttgattgcttatctattgaaacattcaacaataatttgtctgaattagaatcattgatttgcgtcagatatattttttgttaattctcactctgaaacaatttcaactattctttctgatagtattaattcattgaaaaaatctatagttgagctaagatcaaaatggtcaaaacataaacctactgaaaaaacggagttatctagtgttgtgtctgttcttcaaaattttgaaaagttggctgatgatatcacacaaaaatacaaatatttaagaaatgcatgtgatattgttaatctaccatttaatgttgattttactaaagaaagagatgaaattatggaatacaatttgatgtggacagcagttttgaaagttatacaatcacataaatcatattcgaatgctggaatgggaaacttttaacgtagatgaaacaatgaaatcactcggagatgttcattcagagtcggaaggcactgattatatcaactttgctccatttcaaactgtaaaaagagtgttaagctatatactaaagtctctaccatttttgaacattttaaggaaagcacaatttgacgaatcacattgggctcaaatatttgaacatactaagaagaagctacccgaagttttgtttgtcggtgatgttttggaccttgatgttcttcaaaatgaaaagtatttgaaacatgttatttctaatgccgaatctgagaaacttcttgaacaatcaatcaaagaagttgaaaagacctggttacatcaaaagtttgaagtttatgtcagtgtatcaaaagttacgcttctgtccggaggagagtatttactgggaaaaattggagatgatatcagtactttagagtcaattaaattatctcccttcttttctaaatttacaagacgtgttgcaaatatggaagagaaacttaacagtatttttaatatcttatcagtttggtatgaggcgcagactcaatgggtctatttacttggcgttttcaaagaacaagatgaattaactaggctgatccctcttgatgtttccagatttaagaacgtatctcatgaactaaaatacattatcacaagcgctttgaaaacttcagtggtgatggacatccttaacgttcctgagattgatataacaatcaagaaaacctgtgacattttaataactatcaagaaatcattgcttggatatttggaaaagcaaagagaaatatttcctagatttttttttataggtgacgatgatctattagaatttattggtaattccacggatattttagtaattaataaacatatccaaaagatttttcctggtattgcctccgttgtttatgatgaagctggtacatttattaaaggtatcaaatctattgaaggtgaagaattacttttatatgagccaatattattacctagaattttaggtttggttgatctgctccagagtttacaaaacaatgttcaaaatacattgttcacctttttgaaagctatactgcaaaacattcattcaaaggcaagtttttctaaggattcgttttggaacattattacttcatatccgaaccaagtattattattaggataccaaatacattttacaggtatgtttgaacaggtttttgagcatcaaagctacgatggcttgtccaaagaattagaagattatattagtgcctgtattgattatatcaaaaccaacttagactatttatcaagaagaaaaattgaaaatttacttttagagcttatccacaagcgtgatatccttacatttcttgttgagaataaagctattcatgcacattcttcaaagtggttttctgaacaaaaattctattataatgaatcaagtactgataaactctgcagtgttattgtgaaacattgtaataatgtatcattttacggatttgaatatttgggaaatcctagaaaacttgcttatactcctttgttatcttctgcttttgctttattatctgaagctttagaccaaaatcttggaggtttgttgttgggtcctgcgggtactggtaaaacggaaactgtaaaatctttaggttataacttgggtcgtcttacatttgttttttgttgtgatgattcatttgatgtggaatctgttagtagaataatgattggtattagtcaggttggagcatggggatgtttcgatgaatttaacagattaaacgaacaaactctttctggtatttcaactcaaatagaaaagatacagttagggcttgctgatatcaccaaaactattgaactgattaataaacctatgtcagtgcatcaaaactctggaatttttatcacaagtaaccctagttatgaaggtagatctattcttccggataacattcgaagcaaatttttgacttattcaatgatgatcccggactttaaaattatatccagagacttgcttataactcaaggattcggaaaaggttcacttgcatctgaaaaacttgtgggatttttcaattttttaaaccaaaactgctcacagcagaggcattatgattttagtttacgttctgtgaaatctgttatcatccattccggtaagctattaagaaaaataaagaatacagttgatgagttagccctggttaaaaaaggttgttgtgacgtagttttgccaagattgataagtcatgatgaagatactttttattcagcactttcttccttttttgggtctgtcgaagctgttatatatgatatagagttaactgatatcttaagaaaaactgcattgtctaaaggatacactgcttctaagttttggatagacaaatgtttgcaagtatacgaaattcagaagataaacccaggtttcatgcttgttggggaatcatgttctggtaaatcagtagcattctgtatgttgctagacgctatttcacaatacgaaaataaagaaaatgtttgttatagaatgaattgtaaaactcttgaaagaacagtaatatttgggaaacttgattataccacacgtgagtggaaggatggtgtgtttactcaaattatgcgtaaaataggctcaaatcacaaacaatatgaatctaagaatatatggattgtgtttgatggtgatgttgatcctctgtgggtagaaaatttgaacagtttgttagatgataacaaagttttgtctttaccaaacggtgaaacgattcatttacctgaaaatgtcagaattgtatttgaagttgaggatctagatcatgcaactcctgcgactattagtagatgtggaatcattctatttaatagagaatatttcaatatgaatgacttatctaaatctttgtctgtacaatttaaaaactccaaagtgccaaaggaagatgaaattaataaaagtttaatgttaagtgacctttcagtttcagactataaaagtgatgttgtaaatttaatcagtgatactttagataagcagttattggatcatatttggacaatggtttcgaattatcgttcagttttaaaattaacaaagtttgaagttgtttctaacatataccgatatatgtcttatttttttaatgattttattgattttatttccaatagttcagatttcaaaacagaatacggatctttagttaaaaaacaacttttctattcaattttatggtcgatggggtgtggtttacaggaagctgatcaattatctttggccagaaatttatttaatttaccgaaattttacagtttgtttgaagaaaatgaatgtgattctttaattaattctcagctagtattaccagaaggtgaattgaaatctctagaatccagcttgcctgtggtagatttgcatgcacaccaaattttaggttctggtaccatgatacctacagttgacacaatgaagtacgaaaatatgatatttgctttactgaatcaacataagcccctgttgctatgtgggccacctgggtctggtaaaaccatgatgttactatcttgtattcgtgaatcttttgactttgagttattgggcttaaatttatcaaaagaaacaacaatcaacacgattttgaaatctcttgaacaatgttgtcattataaaaaaagcaacaataatgtaactcttacacctaatgctttggggaaatggctagttttgttctgtgatgaagttaatttaccaaagattgacaaatttggaacacagattgttattcagtttttaaaacaattgtttgttgatcgtggattttggcatccagttgataaagtctgggttaccattgaaaaaattcagtttgttggtgcatgtaacccatcttctacagctggaagaatagttatgacagatagatttgtaaatcattgtactactataatggtcgattatccatcagcattatcattaaaaagaatttactcagtttacaccaaatctattttgcgtacagttccagacttgattgggtttagtgatgcgttggctgatgctatgataagtgtatatctgaagtacaaggaactattttctgaatccgataagccacattacatttgctcacctcgtgaattgacaagatgggttaaaggtttatatattgcattaagacctcatactagtttatcacttgaatcacttattagagtttgggtacatgaaggtttaaggctattctctgacaggttaatattaccagcagaaaagcagcgtgttttcaatatacttaaagatgccgcaattgttaactttccacatattgatttaactgaagcatgtaagctgccgattttattttcagattggacttcctttgaatatcaaaatgttagtgaagatgaattaaagatatttgttgccaatagatttcaaattttcaatgaagaagaatcaaacgtcaatattatcatgtatgatgatttattagatcatatcttacgtgttgacagagttttgaaaaatgaacaaggtcatatgattttagttggtcctagtggtagtggaaagactacacttgtcaaatttgtctcatggatgaatggtatagagtctgttcaacttaatgttaaaagtggctttagtttaattgactttgaaaatatattgaaagacttactgttgaaatgtatcactggaaaaaagatatgttttctgattgatgagtctacaattttggaagattcattccttgaaaaaatgaatacattattagcaaatgcagaggttcctggattgtttgaaggtgaagagtatgacgatttgattagtgtatgtttgaaagcatcgcaggataaaggtttgttattggactcgaatgatgaagtatatcaatggtttgtgcaacaaacggctaaaaacttccatgttatatttacaatgagtgatttatatggtactaaagacaaaccatttattaaatcatctgcattatttaatagatgtgttgttaattggatgggaacatggtctaatgaaactctaactcaagttacagaaagtactacaaaactaattccactcgataaatctaaattccaacctaacatagatagtgaaatagaaaccagtacaagaaatattattgtgaacctccttctccaagtttaccgctctgttaatgaattgctccaaatcgatattgcaccatgccagtttttgaaatttttgagaaacatttgccacgatgtttgtcgatagtcaaaattctttacaagagttaaatacgcatataaacagaggtctaaatcatttgaaggaaacgtttatgagagtgaaaaaagttaggtacattattaaatgaaaaagaggttcaattaaaaattgaagatgaaaaggctcgtaaattacttgataagatgattagtgatcaaaatgaatctgaaagaaaaaaagatatgtctctgaaaatgcaagaactttttgtcaaacaagaaaaggctattattagcagaagagaactcgttatgaatgaattgaatgatgttgaaatagtcatagaagaggcgcagaagggtgttatgaatatcaagaaacctcatttgacagaactaagatctatgcataacccacctgacactatcaaattagtacttgaagctatttgtataatgcttggctttaaggtatctacatggagagatgttcaacaagtgattagaaaagatgattttattgccagcattattggattcaaaggtgacgagcaaataactgaagaattgattcattacatggaatcaacatatctttcgaaggaaaattttaactatgaatctgcaaataggtcaagtaaagcatgtggtccattattgatgtgggtcaaagctcagttaagattttcttcaattgttgttaaaattaatcctttgaaaaaagagttaaacgatcttgaaagtgaactggtggacacaaaagctaaagttattgcaattgaaagtttaatttcagatttacaaagtgaaattgaaaaatataaattggagtatagtgaaaatattcgtgtcaaggagaatataaggattgagatgaaattcgttaaggagaagctcgagagaagtgtagctttattaaaggggttgaaaagtgaacatgatcgatgggagaaaaacatttgtgaattcaagaaggaagaagagtatgttacaggtaatgttatcatacaagcagcatttctttcatttttgggaatttgtacgccaaatgaaaggctaataatgtttgaaagatggaaggaattattgagattgaatggagttgcatttgatagtaagatagatataaattatatgccagatatattatctgctgataatataattaaatggaaaacgatgggattatctgatgacatgcaatttattggcaatacatcaatttttacattcttcatataacgaacaattttccttcatcgtagatccatctaatcacttggttccattcttgactaaattattacaacctaaaaagctaactattactagttttcttgatcctgaatttatcaaaaaactgaaaaactgtatcaaatttggtggtcatattatcatacaagatggtgaatattatgatccaattcttaatcgattaatatcaaaggatatagaaattataggagctaatagaatgatggttaagttaggtaatgaagaaattgatttatcaccagaatttcaactatatatcacgactaaagattcaagtgcacatattccaacttttgtcatgagtagaatgaatatcttaaattatacatttagtaaaagcagtatgatcaatgaagcaatgaatttgattctacattataaagaacctgaaatggaacaaaagggattagaattaataaaacttaattcagagtataagttgaaacttagaaatcttgaaaaggagttattagatatattgagtaactctgaagatagtattttagataataatgagttattaagtaaattagaattcatcaaggaagaaacgattactcttgaagggcaaatgattgaaatcgatgaaatgatgttagtacataaaaacattagagaacaatatacttcgttgggtgaactttatgctaatatttcacaattatttgataaattctccactattaataaaatttacagcttttccaatgattatgtcaaaatgatttttattcaattactagaaaccaatattgattttgatataactgatttgaaggtgaagtttgtccatttagtttacagtaatgcgtgcgtttcattgttatctgaagaaaagaaagtgttattaaaattattgagtaaattggttgataacgaaattgacatcaagaagatggaagagttagatttcaatgaacacattttgaatagttcattccttttactaagatccgataaaggtaatgattgtagtgttacgatcacagatattgctgaagatttaggtaaaacagttaccaaatatgcattaggttcaaatgatggtttcaaagttgctaataaattaattgcagaacataaaaacagagatggatggataattattgaaaatatacaatattctaatgaatttttacaatctataagtgatgttattgaaataatgaaattacaaaaagatgttaaattcaaattatttttaacatgtagtattgattcttcgataccaccattactaattcaatcatgtaaatcaatcattattgaaaaaccatctagtttgaaacgatgttttgttgaaattgcactaaatgaatcaaacaccttaagtttaagtcaactgaagaacaaacaaccaaaagaaattagaaaattaagttttatattagtttggttttattcactgattacaacacgtatgaagtattcaattaaaggttttgggtttaataatcaatattctattaatcaaaatgatttaaaaaatgctgagaagtttttatttaaattcattgaatcaaattataatgataaatttgaattaactaatgctatgatgaatacaattgcaaatttcatttcaggtttaatatttggtggtaaagttgatgatgatttggatttaaaactacttatagaattagggttcaggatattcaggaaagaattagtctacgatgatgattctattaatcttttaatattacaaaaggaagaaaataattacaaattaacaattcctaaaggttacgatattatagattagtgttgattggattaatgaacttccagaaaatgaaccgatggaatggttaggattacctagtgatttcctcattcaagaagaacaaattgaagatagaaaagttgaagaagttgttgctaagttaatagctaatgtttagtttagtaagtactagtgtctaaaaaatattacgtaatacattatttaaaatattagttgtaagtccctcttgacatgaaggtaaaacttgtacctgaaccaagttctttttaccaaagatgggattattctggaataagaaatcaagtaatgatgaacgaaagttagagagtcaagttgaggaacaaacattacctgatgatttacaagattatttaacaactaaagaatcacaattaagtaatagagaatttaaagaattattacgtcgacagagtgcaaatgctgaagcaagtaaagaagcagagaaagcatcaactgaagatcatggtcaaaattatcttgatttagttcaaggaacgaataaagaaggatgaagaaaatgaaattaaattaccaaatgcaatttcaacaattaaggaaatgaagagaccaaaagaatataaaaattttgaatttgataaatatagacgtgaaaatgatgaaaaagagagtgttttaattaattgttctgaaattcaaaatgctttctataaatgtcttaataaacaaacaatttgggatagaattagtgcagttacatcactaaattctgatgattgtacaaaattagcagatttttttatggcttgtacagatattcaaaagaaagcatttttaatgtttgattattcaactttacaatcaattgatgaattaaaatctgcttcaaaacaaattgattatagtttctcaaaatcttttcaaagtattgaggatatacaaaataaggaaaaatttatggattatacaaaggaactcagacgtcaaagagaattattctttgaaaaatatggtaaataaatttaagttattaatataattattatctaatatctatagatctaacatgtaaataaaaaattagtgaaatatctaagttgtaaaatgtaacctaataatattgcttgaattactatgctaatttttactcactaatttgatagttttaattattgataactacaagataaagattttttttttgaaatattattaaagttataactaattaaaaaatgttatataaaattcagagtaaattaattaaaaaagagtaaattattaaatattaatatattaacaaatataagcaaaaacaaattgttaataaaaaaattaaaaatgttttttttttattatttttttatatcaaattgaaaattatcttctttaatttgatttttcatgttgagttgaaactctcttcattgcagcaacgaaatcttcaaatgatctgttatcttccttttcttttaatggtttaccattcatgaatctgtcgaatttttctgattcagacatcatgtagtaagcaccacctaaaacacagaagacaccgaatgaccaaatccagactctaacgacagtaacaatgtcgttccagttttgtgaccaccagccgaataaagtgaaacaagttgcaataatatcaacaattaaaacagcaccagataattgccatgatggaattgatgaccagaatggaccagcagctctagtaatgaaaattaaccagttttcagttaaagaaatttctaagaaaagaacaccatcaattgaaccaaagttttgaataataccaccctttggtaagaacatagtagttaaagtaatccaagtaccaatagctaaaataatacctaaaataattgacataccccataatcttggtaagttccatttaactggttttggagcaaatggagcattatcataagcaattgctaaagtagcaacatcagcgaaaatagcaatgaaaacaactaaatcaatgttaagagattcatctaagatagcaatccataaaccaaggaataattctaaatgtaatgataaagcaattctgtaaacaacgtaagagtacattctgtggaaaatttgtcttgaagtcttaagagcatcaataatagcagataaaccaggagcaaggaaaacaatatcagcagcagatctagcagcatcggaagcaccttcgacggcaataccggtatcagccttctttaaagatggggcatcattgacaccatcaccagtcatagcaaccaaataacctctttcttgtaaaatttcaacgacattatatttatgttgtgggaaaacttcagcaaaaccatcagcattttcaacgaaatcatataattcagaacctgccatatcaccaccaccacctaaacctaatctttcagcatcaaaaatttgatcacctaaacctaattgtctacaagtttccttagcaataccaacagcatcaccagttaacatcttaactcttaaacctaatcttcttgcttctgcaacagtttgagcagtatcatctcttggaggatccatacatggcataatacctaaaatttcccaatgaccttcacctctctttcttgcaacacctaatgatctgaaacctctactagcgaattcttcaactttattttgataagcttctaaaatatcttctggaattggatgatcttcagcaacagtctttaaaacgaataatggagcacctttaacacaaataattttttcaccttctggggattcaacaatagcagtaacttttttggaaacaggatcgaatggttggaattcaagagtcttgtattctttcattgcagctctagcctttggataaccaattaaagattttaagaaagccttatcaattgcatctaaacccttcttctttcttgaagcagctaaacaagcagttaacattaaatcatcagcttcaacaccagcaacagtatatggttcgtgtaaggataacttgtttttagttaaagtaccagttttatcagaacataaaatttcaacaccagctaaagattcaattgcagataatttttgaacaattgcttgtttctttgctaaatatgcagcaccaacagccatagtagtagtaacaacagctggtaaaccaactgggacaccaacaatggtaattgctaaagagtatcttaagattctaacaattggatcagatctgtagaaacatgcacaccaaactaataataaagttaagataacgaaaaccaataataaagtaccaataccatttaaaacttcagtgaaatgaccttgaccaccggaagctttgttaactaaagcagcagctctaccaacgaaagtgttatcaccagtagcagtaacaatcatgaaaccttcacctctcttaacagttgaagatgagaaagttggatcattacatctcttatcgacagctaaagattcaccagtaattgcagattgatcaatttgaataaaacaatcttcagtaactaatttaccatcagcgggaataacaacaccatcttctaattttaaaatatcaccaggaacgacttcattagcagcaacatcaaccagttgaccatctcttaagacagttgcagtattagctaaagttttctttaattcatcgacaatagaaccagcttgatattcttgaatgaaaccgacagctgcatttaacattaataaaccacaaataacaccaaaatcgacccaatcttctaaaccacaggctaagatagcagcagcttccataacgaattgaattggaccaataaagaacatacagaacttaagaactaaattttcttgttcttcagccatttgatttaaaccaaacttcttctttctcttagcaacttcagcggaagttaaaccaacagatggttcagtatgtaaatattcatctgggacttctttataagatgatgaatgatgttcttcttcatcatcttcatcatcatcatcagcatcgatgttatggttagattgtaattccataactaattcatcgatatcttcatcatcttcttcatcatcagcaggtggagcgacgactggagctttttcagcaattggttcgtgaacttctttttcagacattttgaaatagtacttttatttttaagtagataaaaaatttattttattttagttattaaaaaaattgggggaacgagtgaaataattgaattaataagattttttattttgattaaaaaatataattaattgaatgtatagagtttttttttttggttattaaacactaaataaaataattgggtatccgttactttgataaaagagtactgataaatgaaaggaagcaaaaaaaaagaggattttagaaaagaaagaagaaaaggaaggagaagttaaatacttaaattaaataacagaaagaaaagagcataagtcgaccattttaaaaaaaaaagaggaacaggcaactaatttaaaaaaaaccatggaaagtagtacagaatactggaatatgcccgaaaagggcagaaagtcgcagaaaagagtgaatttattactattgccctatatcgcgcttaccgtaataggcaaaaacataacaaaaacagtgaaaatattatggaaataattatgaaaatagtatgaaaacagtattaatttccgcactattttaataatattttaataaatttcattggctaataatcaataataataataatatcaataatagatattacatcatattatagttaatcataatctattttccacggagtatttcccttatccgctttaatatccgctactattctataattataccgattaattactattggttatacacttaataatactattactatactatacactatacaatacaataatcgctgttacaatttgatattgtgactgataacattaataagttaattaataactaatacactaaacaataacttcctattggacttcaattactattgtaactattatagtattgtaacctatattccctcacacacctcactgtaatctttctttcattggtgattattattttcatctttatttttatttttattttcattttttgttctgttatgtgcttcttatttccgccacagtcgcgtctgtttgtcaactcgtattttcattatgtatgctctgtatcaccctataaactccttattctgttcagaatactaacagaaaatactcttagaagtagtaatagtaatattatagtaataattaacacttccagtaccatattctgtaattgtgaacagtattttacactttataaaaaattgtcttttattaccttacattaaattttgaaattcttcaaataattactcatgttacaatgattaactatttcaattacatttaaaactaactatattactacaaaaactattctaatactataccacagtccttctactacaattttaatctttttataccatcaattcctattagtaaacacctattttaatacctttaattagtcaaattatatcaaacacaacatttctcatgtcatactcaaaacatgttttttttacataaccctaaattaaatttaatcgtagatttttataatcataattaatattgacaactaattaaaccccttttattttctatatacaataatgccaacaattattgataatatacttgaattacctgatataatagaaaatattaataatgataataaacaaattattaatatttcattaattttgaaaaatttatcaaataatttaacttgttcaatttgtcaagatttaccaactcaaccttatttattaccaaattgtggtcatactttctgttattcttgtattaaatattggtttcattataatccttcttgtccaatttgtcgttcaattattggtgatgttaaacctgttttcaatcatactcttaaattaataattgattcaattataaatgatttgaaaatttcattgatcaattataatgaattattatcttcaaaatttgattccttatataatacttggtataatgaaaaaaatgaagaattcattactgataaaaaaaataatttcccatggttaattaaattatcagaaaattggggtagagcagttgttgatcaagaagatggtgtacctcgttgttctgcttgtcattgggaattaattgatggtagatgtgaaaattgtggtagatctgtagttggttggcaatcaagaaatgatggtgatgatttagatgttgatgaagatgatgttgaaagtgaagatgaagatgaagatgataatcatagagatgaaaatttaatttcaagatcacattatactttagcttctgatgatgatttagatgatgattataatgattatgataatggattacatgatatgtccggtcgtatagtacttaatgaagctgaagaggatgatgatgtagaaattgatgaaaatgaagatgatgaaggtgatgatgttaatgaagaatctttcgttgatgctagatttaatgatgattatgaaagtgatgatgggtttatagtagatgatgatgaaatggaagaagatcaaatcgataatgatattgatgaaaatgatgatatagatgaaaatgatgatatagatgatatagttgatgaatcaggtttcctatctggtgatgaagacatagttaaatcaagacgaaatatagtgaatctatccaatgatgaaccaacaattgtatctgaagatgatacaaatgatctagtagttaataaaagaaacagacaatcattatttgtaaatgatgattcagatgattcagatattgatcaagatattgatcaagatagtgacgatgacctgaaaatttcaaaatcttactctagaaagaaaatcatatcagatgatgacgaagacgtagatgaagatgaaaatgattcaactacttttcaacctagaaaggcataaacataagcataagcataaacacaaacatcatcataaacactccaagaaacggagaaactaattactatataattctttgctaaataaactattttacaagtaaaaacattcttttctctatacaggtaataatatgatattaatctgcctatctaaaatctataaaaaatttatgatcgtataactcaatcattcaacttctagtaccaaataaaatttcagtatcttcatcaatccatttaacgagatatttaaaattatctcctgctgtatcgataacttcttcacatttttcttcattcttatttttaagctcatacactgaaaggtcataatacgacatcatcttaggtattaattgttgtaaaaataggtcttcttcactactattttcaacaattcatcaacagttttatcttcaacatttttttcaatattatctttgtttttatcttccaagctcttagttcccatttgggttagaatttcacgatttttaatacctgcagttttcaaattgaaccagaaaaattcatcaataataatattcttctcacctttaagccattctaatatcgtaattaattctttaaactgttttgtactccaacaatatttaataaacattgataaaaatctcataatattttgatcaccaacaattttaacattatatttctcaaataaatctaacaccattactgctttatcatataatttagatttgacacaaaatttaaataattcaattaaatctctacaatcgactattttagagttttcaataaaatcaatttgttcactgaaaagttcaagtgccttttttctatttctcctcttgtgatacatttctaaattcagtctaacactcctaactcgatgtctagaaagtctattcatatttttaacaatttcaaataatctatcaatctctgttggatcattggtaagtctaatggccttacgtaatatttcactatcaggtaaaataccagaatataatcttgattcaatatttcttaaatatggatcagttggtaatggttttaattcagaatttatattatcgtatttgactgatgcataatgtcgtctttcatctgtatcaacattaactggtatttttttaacaactaacaaattcgataaaaatccaaattgatgatactttgatttacttaatgcttttcttaattttctatgaattccataacctaaatgtggatatttattaatcatacctctccaataaattaaaacatgagtccaatgaattttaaaatttgattcttcttttaactttttcaatagttggaataccatttcaggattttcaaatttctcaaaatgtctaagtaatgaaaagatagttatttcaaaatttttcttattattaatcttcataaatgtctctagtgctaatccaaattctccgtgtttcaagtgtaaatatgttaaattgtttagtaaactggatacttcattttcttcttttgcatgttgaacatattgagttaataattcagacttcataaattcatcatatgattttcttgttttggatacttgattacataccctaccaaatttaactacaaacttttcagttaaacctcttttttctaatgactgttcaatccaagcaatgtcttccgtcaaattgcattctaccaacaaattatacatgaatgaatcaatagatggattagtttgatgatttcttgatatccaaagtttgtaagatgacaaacataagtttggatttttcgtcttattgtatagattggaaatgaaaatgtttaataaataattgggtaattctttttcagtcattacactttgatggaaaatttgtattgccatatgaatattttctgtctttaaataaacttgaatagcattagataaaacatttgcagatgccgttatttttctatgttgtaagatttgaaatagttgatcaaataatttataatcaaacgcagcaaatgaaacttgaagcataacatccaacattttatcattcacattatcatagtttatttccttttgttgaatttttaaaagtttatatgcataccatttaaatggcaagaattgaacaaataaatgtttaaattcattatgggttagatagtcccctttagattcatttctttgaactttaagtattattgatcttatttgattttcatctgctagtttattaagttcttcacaacttttatactcagtctttcttttcaaaagttttatattcttcaatttacgttctgttagtttttgaaatgatttaaaagatacagaatttaatgtgtttatactctgtaaattcctttctgtacaattgagaattttgatcgttttcattgctttatctggtatttctgaaattgctttcatttccttatcagctattatatcagaattcgttatattggtattaaatcgcacaccaacagtaaatctatgggttaaattaatcagattggtaaccataatggctcgtatcttgggtctgtgattgtaaatcattatattagatttttttcgattggttgatttaagttcataaaataaaaaaacaaaatgggtatttataattaaaaaagtgtatatgtacaagtttatatttgaaagtctaaaagcgatccgtttggtagttgtaatttaatggtgacttatcaaagctatttatcgtagacaacttgaaattttcagattcatgatgtcgaacaattttgaaacaattatgaatccatacgttttttttgtgaaattttcactcgctcttccttttaagacatctaatgcgctttgtatggtaaaagtataattactgtgcagtttgtgtggagaatcatgtcgaattgaaccacccgcatttcaaatcaatcaataagaggttggttgacatggatgagcaacaataaggtggcactcatcttatatacttggaccaaattaaatagacaggtatcattcttatattataaaacgtattttttaatattttaattacaaagtattgctacaaaatcaattgaatgctggatgatatcaattataatttagcaccgagattaatatgaacagatttagtttgttggaaagctttaagaccttcatcacctaattctctaccattaccactcattttataaccaccgaatggcattctaaagtcagcaggcacaagtgtagttaacgaaaacttgaccactttcaacttttctgatatagttttgtgatctaacaatatctttagtgaaaagatatgcagctaaaccataatctgaatcattacttaattcaattgcttcttcatcactcttaaatttagaaacaacaataacaggaccgaaaatttcttccttaacaacagtcatatcttgattacaatctgcaataatagttggttcaatataataacctttcttctccgtttgagatggaataccaccaccagtgatgattctaccaccttcctttttagcagattcaatatatcccaagactctttcttgctgagctttacaaacagctggaccaacattaacaccaggtacaaattgtgcaccttgaacataagcttcttcaacatgatctttgaacattgttaagaatttatcataaacactttcttgaacataaactcttgaacttgcagtacaaatttcacctttattaaataaaacaccaaatgcagcccatttagcagcttgttctaaatcagcatcttcaaagacaactaatggagatttaccaccacattctaaagtacaatactttaagtttgattttgctgcactttcttgaattaatttaccaacattagttgaacctgtgaatgaaattttttgaactttcatatgttcacttaatctaacacctgcaacagaacctaaaccacaagtaacattaacaacacccgctggtaaatcagcttcttggaaaatcttacacatgaacaaagcacttaatggagttatttctgaagttttaacaacaatagtattaccagctgctaaacatggagcaactttccaagcaaatgtactcattgggaaattccatgcaataattgcagcacatacaccgtaaggttcagaaattgtatatgtaaatttagaagtttcagtttcaattgttttaccatcttgagcatgaattgccttacctgcataatatttgaaaacatcagcagaatgtaaaacatcaaaaatcgcattagtttctcttggtttaccactttcaattgcttctaaatctgccaattgtgcagaatatttaacgattaaatctgcaattttatataaaaattcagatttagcctttcctgataatcctgaccatctattcttaaatgcatcttctgcacaatcaactgctttatcaatatcttcattacctgcaactgaaactgaacaaatggtttcacctaaacctggatcttcaacttcaatagttgaaccatcaattgattcaacgaattcattattaataaataaaccagttggttgttgatatttagttccattaggaattttaatttctacttcttttgctaatgacattatttgtttgtttatttatatatttgttttttgtttaatgaagaaagaaaacttggttacttcagaaaaaactttgggacatactgccttccttttatactcttatcttctgtcaaacttaaccccgtaatgttatctccaaaatcatttacaaattgtctttagcgataattttcagtatctaaattaccggattgggaaggtctaggcgtaaaagattattagccaacattaataatttcagggtcctgaaattttcatttaacgatattatgcatgttagagtagacatgaatgaattattttgaagcctatataaaaactagattatattatacacgtaacttaggttgatgttctatcagttaaaccttcatatgcttctccaagataaatttgaaaattatcaatgatttttctatgtgactcaatctgttcaagtcctaaactacgtaaaaacttatcaaataatcctacaagtacaatcttagtacgttgaataattgatgcaattcttattttttctgttgaaattatcaaattattacctttcaatgatgaataatcaattattattgatagaacattatctaatttagcaactaatcgtaataataatatccaatctgtaaatgtatttaagtcatatttaacaatgtaatcaattaaatctcctattattgtaatataatatgaaacaaatgatgaactagcaatattatttggtaattcaagatttttaacatttgattcatcattggttattaagatcattgatggtggttttatcgagttgtttaaaatttctttcatatcttcaaattcatttccaaacattgtctcgattgatgtatcaacaattatatttgcatgataaattgttggtatacctttaaattgagacattgcataccaaataaattcaattatatcatctattgtgtgcaattaatctattgaaattcgaagtcctacattctccttcatcttccctcgaagataaatatttaacaaatcctctccttatagtcataactttattatcaatataatcatttaatttttgaatttgtaaatcatttaaatttttaatatttagtccatcttttaatattatcggtataggttctgatgataagagtgtggaattttcaccaaatggattaagtgaatcaattggtgccctaattggatcacaaaaatccatcatcggagtgatataattagaatctttaggtattgaactattcaataaattttctggtagttcatcttcaccttcactattttcaggtaatgaatcggaatgttcaaattgtttaaaattattaattggaatcttctctttattcaatattattgtatcaatatccatttcatcgtcgtcttcctcgtcatcaagatctaatagtgcacctaattcagtagggattttggttgtaggagtttccacttccttttgcggtagtttaggagagtcaggtatattgaattgatccatttctgtatgtgttgatatacttttcaagtacttcatcaaaaagaacaggccattaccccctatatattaggttgagtttgtcaagccccagaaaaacatgccaaaatgtgactttttccataagagattacgtaaacatttttatgttactgataatagtcttacaccattcactttaagttataattcattaattgacggacactaatccagtaatacacaatattaaaaaagcagtaaaaaatattaggttataaaataaattttattatttaacaagatttgcaaatccttcccttgaaactaatcttgtaaatgttttcaatccaccattttgttcaacacaccaagcatcttcaacagcaaatgctaaagattcaataaattctatacctaattcacgtgagattaggaataattctttacttataaattccttttgttgtaaagtttgagctgcacaagcagcaataaatagtggtaaaattgtgaaacattttggtatatgatgtttattatttggatttataataatacttgaatataattgataacttgtaataaattgatctaaataaaatccaacaatcggacttgaagcactaacagagatatcactaattgtaaggtataaaatttctagtgacatatgagcacattttgcaaattctaataatgaagaattttcatgtgattgaatttcagatgtttgaatagttgtccaaataattgaaatatcattcttcaattgttttaaattatcatttaacatttgtgattcaattgaattacgagttcttaatatccaaattgatttagctaaattttgtaaaatatttataattgcagtattaataacattatcgagccattccatatcactttgtgaatcatcatcacttggagatgagttgctattagtgtaataaccatttagtccagagacggtggaattttgtaaattattaataatcgaagttggtcttagagttagtattattattttgatatttgtatcaatcagtactatcgagcatttccttattatatatttgaaatactttagaaggtggcatagatgaaactaaattatcaaagtttgcgaaatatatcgatagtggatatgtaaataaaaattcataaaatagagctttatcataattttgtgaattttcagatacagtgtcaatagatttcgtagattgtgaagatgtcattattaaattagacacacaactttcagataccaaacccatcatctggatcagcagcacataattgtttcattgcaaaaattgaccagggttcaactttgattattgattgaattattaatcgaattgattaaattgatcctttgattgattcatatctgtattttcagttattatttgaattgcattattataatgtttcaatgaaggcattgttatatttatcagtatgagtatttttagctaataatgaacaacctcttgcaaaataaatttcacgaaatgcagctaatattggtgatttaacattacagttggaattgaaactttaggtgtataattcattaaagcatcatagaatgaattatcagataattctggtgtaaaatcagataataagtttatcatctaaacttgggtatatagaattgaacaattgagaaattgaattgaattcagcaaatgaatcactaacatgagatgaatgttgtaaatttgatgaaattttagtttgcttatgttttaaagttgaagaatgattataattgtaatttgagtgatcaaatttaataactgtatcgatatcatcaggaattatagttttcaaaggtaatggtcttatatgattatagtttttcaattcaataactgaacaaagagtagttggaacatctgagacatattgatggagatcattaacagtttcaataggttcatcacttatttgaattttagatttaatttcctttttcttagagatagtatcagtattattattattattattattattatcattattactaataattttttcaacatttgagttaaattttaaacttgtattaaattgatcttgagatgaaggtaaaatttgaaaatttttaggcattgtttcacttggattagttggccaaacacaacaaaggaaattacgtgaacaacctgaacatacgggaccattttcatcacatttcttctttcttttcctacatgtaaaacaaccagttttagttctaacttttggtaatcgtacttgtttaatagaagaagacttttagtttaggtctctcccttgtatccttaggcaatagaaacagacattgtaaaatagataagattgttatggtacagccactaactccgaaagaggaagtaaatcaggataagaacaaataagaacaaataaaaatcagactaaaacccaaaaagatcaaaatagaattaaaccagcggataaatctgataatcctccacagtaactgtcacagtaaaattaaaatttctcaaattcccaaaattcaattaaatcatgctagaaaaagtaaaaaagaaatttaataaatctaatacttaccctgtctctgctcccaattaggaaagtttaggcgatatataaggaactgtatgaaaatagtatttttcattacagctaggcgaactttttcaactgataagaccttcctaatatggtcgcttatcagtagaattcaatgtacacatcggacactgtaaccgttttttcagaatttaatataaatagatcctctaagaacctctacttaaaaactgtcaatcattttttggatctaaactccgttcttctctttgaaaaaactcatatttcttattacttcccttcttttaaagagaacaatcaatttcaaatcaacaatgtccactttagatattaaagcaccaaaagatatcgaatcctttatacactttcactgatgatgcaagtaatcctgaacttttcgaatcttggaaaccaaaaattcaagcttacagagatgaacttgacaaaaatactttaaaagaatatagagttccagaatctgatatcccatctgatattgatactaaaatttttaatactgttgagtttttatcaaaatcaactgctttaactgaaaaggaaaaggaaattacttcaatgtctgcaactgaattagctgataaaattgcaaaatctgaattatcatcagttgaagttttaaaagcttttgctcatagagcagttattttacaacaatgtactaattttgcaatggatttctttattcatgaaggtttaaagagagctgaagaattagatgattatttagctaaaaatggtaaaactgttggtccattacatggtttaccaatctctttaaaggaacaaattggttatgctggtaaaattactaatggtggttgggttagttatttagattatatccctgaagaaaatgcaacaactattaaagttttacttaatttaggtgcaactttttatgttcgtactaatcaacctcaatctttaatgcatttagattcaaataataatattactggtagaagtagaaatccttataattctttattaactccaggtggttcatcaggtggtgaaggtgcttgtgttgcaggtaaaggttcatgtcttggtgttggtactgatattggtggttcaattagagctcctgctgcattctctggttgttggggtttaagaccaacttcaagaagaatttcttgttggggtggtgtatcaagtggtagaggtcaagaatcagttgttgcagttgcaggtccacttgcaaattcaattgatgatattgaattatttatgaaatcttatattaatgaaggtaaaccttgggatgatgatcaattatgtattcctgttttatggagagatgttccaaaaccaaatgcaaaggatgtaactgttgcaattttatatgatgatggtttagttaaacctcatccaccaattgaacgtggtttaaaatttgttgaatcaaaattaaaggatgcaggtgttaatgttattaaatttgaaccttttgaaattgaagaagcttatgatgttgttcataaaatgtatagttgtgatggtaattatatgcaaaaggaaatgattaaaaaatcaggtgaacctttattaccaatgactaaatgggctttatcattcggtgatggtgataaaatgtatactgcagctgaaaatagagatttaaattatagaagagatgctttaagaaagaaatataatgattattttgttaaaaataaagttgattatataatttctccaacttatgttggtgttgcatcagttactattcaagatggtattgcaggtgcttattattggggttacacatctttatttaatatcttagatttaccaactttagtcttcccaactggtttgagccaagatccaaaagttgatgttaaggatgaatcttatgtcccaagaaataaacttgataaaattgaacaagataaatatgttgctgaattacttgaaggtgcaccaatttgtttccaattaactgctagaagatatttcgatgaagaaacagttgctttcggtaaagtcattgatgatatcttaaagaattaggtaaattcttaattattacattcacccttatttaaattattattaatagatcattattttataaactttttttttaaaaaacataaactaagtaaacattattctaaaactggtaaaaattgaccaacaattaacattggtatatcaaaaacatctctcttaattgtccaaacgcaacaacatttaagataattattatcttcagccttacgtaaattacaatcagttaaataagttgcatttaaatcaccgaaagcaaagttactaaaacttctaaaataattaattgtactttcatcatccattaattcaacaataaatgtacgtttactcaataaactcatttttgaataacctgtcataacagcaaattcatttgttaatgcaacaatttcaccagttcgtctccaaataattgtaggtgatggagaaattgaaattaaattctcatattcaagtaatgtcctttgaaaactcctttcagtgaagatcaaatcattttcatataaatttttagttgcactaataaaacttggtctgtatttcgccatacatttagcaatttctaataattgtaatttattaaaacgtttcttcaaatatgcaattaatgcatgatatgcctttggatattgatatgctttaacgatatttgttaaataaatatcatcaggttgcttgacaacatgtctcataattaatggtgatgtgtaatcatcatcttgttgtaaatccatcggtaattcttttgcagtattaatcatatttgaatgatctgcattataaacatatgaatttggagttgtgttattttcataagatgaaatcattgaaccatcttcaagatttattataatataaggccttgtatcttcaccatcatctaaattcatttggagattattcactgtattattagtactattattattactattatcaccatacatattcatattaaaatttgtacccatattcatattcatattcacatttacatcaggattcatattaacattgatattcatatcaaataaattattcattatttttttattatttggatttaaattcaatatgtcagtcaattgaacatattcatcatttgcaactgcactttcaaaatttttaactgaactgtttgatgattcatgtgaattaaatttagaatcattatttgatcttgttttatttaatggtatactattatggattgaattacgttcaatggtattagttttggttgagttggttacactaaattctaatggtgagccaggagtctcaggatctctatctgaatccattggtggcattattgaacttaatcggattggaaccattatcaaatttcttatttgtactggaatcaatatcagtatcattatcaatacgattatcttgtatgatattattattattattatttttaactgtgtttgttatatcatctgataattctcttttgaactttaattggttttaagctagttggtaatttttcattcaataattttgaatttgataaacttggcaatccattaaaattactaattgaagttgatccgatgtttggtgaaaacgaaaatttattattagcattagcaacagcatcaaattgtggagttcgtatttcttgtaatccatggaaaatattttgattctttaaatctgtaaacgaaggtaattgtaaatcattaattccataattagttgatgatgatgatggtaaattatttaattgcgtaagatttaatccacttaatgaaacatttgctaaattaagtaatggttgatgatttgttgttggtgtattactatttgtagtacctgatattggatttgtatttgataatggcgggagtaagttcaatgaatttggaacagcgactcccaggtccatgtagtgaagtatgctcattagtatttatagtatcatttatcccattagttttcacttttttagtcttcacttcattctttacttcattctttatctttggaggtcgtcctcttttacgaccagttgttgattttgttgatgttgttgaagtcctcgatacatttgatgaatgatttgaaagtttatttgaaattggtttgtccgaattttcatttaatctaacctccgggttatttgttaaggctgtaaccgttgatgattgtgaatcaccacctatcgtactactatctctaccaatgaaatttgttattatttgtgatatttaaaccagttgaagaatcatttataacatcgaattcatccttttcactaccactactacttgaacttttactactactactagtatcatcattatttgaagtaataataccattattatccttattcacaccattcttattatttttattatttctgttatttgattttgactgaaagtttacgtttccgtactgcatcaatacaagtatcagcaaatccctctctttgtacaatttttacaaggtctctcagaatcacattgtaaatgttttgaatgacaaaatgtacaagctacccttgtaggctttctagtttaatttaacttccaatggaagtttcctagtcatttattattattgatttgtgttattgaatattcgctatgtgatataacttatatttattgaataaaattatgactggttcaagcttcaactctgtcatgtgtaccctgcacattaagataaaaaaataaaaattgtgggggatgggttattcccgggaacagcgagtgattcgcaaaaaaaataaaaaaaatgaaaaaatgccaaaattctgggattcagtgggagaaagagggttctcatgggcggaaatgaatgactcaatgggctccgagattctacgctcactggggaaaaactaatacactccgtttatctacgggctttccgtaccaaagtaacggtttcctacgatatacgggaggtaaattccttaacataatattgtaaagactactataataatttaaggtgaaaattattggtttttattaaatcaatggatcttatacaaaatatatactatcatgaaataatctaaactaattaattaaatcaactacacaattaagcggatttgaaaacttctaagaatttagagttatctgcagccttggtaactggagcctttgctgaacctaatttcttttcagagaaagcctttgcatatgggtttaatctgtataagatttgtttgttctttaatgggttcttctttaatgaagaagtcttcttggtttgtgcaggacctgcagcctttaagacagccttaacttcatcagagttaataatcttagtaatatcagtgttagaaacaatgtttgatgggattgaagtgtaaacggaatctaaagctgcgaaagctgattcagtccagataacaaatctacctaaatgagcacctggtgctaattgtaataaacctaaagatttaacattagcagtttcaacacctggaatgtttctgaatgctttaactaaaccattatcttgagcatagacaactaatggacctcttctttgagtgaatcttctacctctcatcttacccttaccagctctcatcttctttgatttaataaccttaataacatccttgtgagcatttaatgcctttaatgcagcaactgcttccttggttttttgaacattttgtaaatcatcagagacaactaatggaatttcagaaatttgttcaattctgtgacctcttgcaagaactaatgattgaacagcagttgcagcaatagcagatgcagttgcatatttcttttcattatggttaaccttgatgtgccatcttctccagattttagttggagcaaacattctaccacctctacacatattaccaaaagcagcttgacctgatctgtgagtaccaccaccaccaactcttggaattctggcaacagctctaccagtaccccatgattcagcggagtgttgcatacctgcattttgtgcaacagcatatgcttgtctcttgttcttgttaatcttagtgaaaacagtgtgaacaacatctggtctaattggtgctttgaaaacagctgggattgggagtgcagttgaggtggtttcacctgaaacagcaataacagaaacttgtggtcttgcggacattttgtaaatgtgtattagttacttaaaggaaagtaaattcaaaagaacttaaagtttgaaataggatgaaaaaaggagaaaaacctccataatgaagcaactgaacgaataattaaagagctcaggtggaaggagacgaggaaactgaaaaatttttcattcaatgaaaattatgaaaattatgaaaatttatgtgagggtttctctgcgtctttttttcttttaagtagctgttgttgtgcgggtaattaagagttacgtaatccactgtaaataaaataaatttttcaaccactaagtaaatcaaaatatttcagtaaagtagtgaaattagggtacatcagagaagcttaactttcgacaaaaacctctacagtacacccacatatacacaatgtctttcactaactgggcagacgcaggtactgaacttcctgcacctcaagtaatcgataataatgatggtacaaaaactgttatctcatatagatataatgatcaaaagaagaaaattaaagtaactcaaaaaattaaattaattgaaacaactgaaactgttaatccattagttgcaaagagaatgaaatggtcacgttttggtcttgaaaaagataataaaaatattggtccagctacaacaacaactaaaattttagaacctgtaactttaattttaagtacaacttggaaggcagatgaagaaaaggaacaacaattagcaaagaagaatacctgctagaagtgttatgaaatgtagattctgtggtaattcaggtcattattctgctaaatgtccttataaagatactttcggtgttgatggtttacctaaatctgaagtacctgctgcaagtgataaaccatcaggttttggtgcaaaatatgttccttcaggtttaagagctggtgcaaatggctttgaaacccgttaatgaagttcctgctcttagatttactaacttaaattcaaatgttgatactcaaactttacaacaacttgttagtaaatttggtccttatgaaagagtttcagttcttaaaaatagagatactggtgaaccaatgggtgttgcattcgttaatatgttgactaaaaaggatgctgaagctgttatggaaggtttgaatggtaagggtctctttaatatgattatctctgttgaatgggctaaaccaaagaaataatagtgtttattccccctcccctctgtatcttataatctttactttatatactatactatgctatactacaatatattatatcatataccttatcatcatacaccttacgatatcctattagtacacttataatatagtctctctaatcaggtcaccccggttttttaaatttatattttcagatggcattataatttatcaggtgtgcatcaggttcctactttttctaccctttcagagcctccacttcttctttttctttcttgttttttacaattgtcttttcattacagtatattccatccagcaaattatgacagaagctaaagtaccagaagaagttaaggaattgattaaaattgatccatatttagaaccattcacagaggaattagctgatagatgctatctagctgataggtggcttgattcatttaatgaacacgagggcggtttactgaaatttgcagattcttatcaatcaatgggtttacatattaataatgataattcaataacttataaagaatatgcaccaaatgcaactgctgcttgtttaattggagattttaatgattggaaacatgatgaatatattatgtcaaaatctttcaactggtaaattttcaattactttaccaccaaaatctaatggtgaaccattaattaatcacgattcaagagttaaaatattcttaactttaccaaatggtgaaaaagttgcaagattaccagcttatattcatagagcaactcaacctcctgctgaatataacaacccttcttatgaggctagattttggaatccaactgataaataccaatttaaaaataagagacctaatttaccacattctttgaaaatttatgaagctcatgtaggtatatctactcctgaacctaaaattggtacttataatgaatttactgataatgttttaccaattattaaagatttagggctataacacaattcaattaatgtcaattatggaacatgcttattatgcgtcttttggttatcaaattacatcattttttgcagtatcttcaagatttggtaccccagaggatttgaaacgtttaatcgatactgctcatggtttaggtttaagagttttgctcgatatggttcattctcatgcttctaaaaatgttgatgatggtttaaatatgtttgatggtactgacttattgttatttccattcaggtggtaagggtaatcatgatcaatgggattcaagattatttaattatggtaaatatgaaactttaagattcttattaagtaatttgaagtactatcttgatgaatttcaatttgatggttttagatttgatggtgttacttcaatgctgtatactcatcatggtattggatcaggattttctggtgattataacgaatattctaaacccatttgctccagttgataaagaagctttagcttatctgatgttagctaatgatttatgttctcaatattcagatgaaaataattgtactattacgactattgcagaagatgtctcaggttatcctacattatgcctgccaaggaaaattggaggtgttggttttgattatagattagcaatgtcaattcctgatatgtggattaaattattaaaacataaatcagatgatgaagtgggatatgggtaatatttcccatactttaagtaatcgtcgttacaaggaaaaatgtgttgcatattgtgaatctcatgatcaagctttagttggtgataaaactttagcattttggttaatggatgctgaaatgtatacccatatgtcagtattatcaccattaactttaacagttgatcgtggaattcaactacataaaatgattagacttattactcaagctttaggtggtgaagcttacttaaattttgaaggtaactgaatttggtcatcctgaatggttagatttcccaagaattggtaatggtcaatcatatcattatgcaagaagacaatttaatttaataaaggatgatttattacgttataaatttttataccaatttgataaggcaatgaatgaaacggaatctaaatttaactggcttaatacagaacctgcatatgtctcattaaaacacgaaggatgacaaactgatagtatttgaaagagcaaataaggttttcatttttaacttccatccaactaatagttataccgattatcgtattggtgtcaataatgcaggtacctacagaattattttaaatacagatagagttaaatacggcggccatggtttaattgatgaagaaaaaagtgaatttttcactgttaattcagaatggaataatcgtaataactacattcaagtttacatcccatcaagaacgggtttagttttagcattagaatctgaaatcaattaattggtttccgttcttaatttggtttcaaagtttcaggaagatacgctcatctgtttttttatttatacctatctactatatacctttttccatgttttctaataaaaatataattcattatttgatgttccatctttgtacaaaatcttttaacgtatgcttatcagcaaaaatatcaatacaagtttccaaaaatacattttgtgctgtaaccattgaacttttaatagttaaaaacatcggtttcttcttaataacatcgcctatttcaacatcttcaaatagtctagaaagttgttcaactttatttgataattgccattgagcagtttcaattaattgtttaccacgacagtttggtatgtagaacaaaaatgcatacgaccatttgagagattctctacattctaacaaagcattcacacattctttataaaatacagactcaatccatgaaacaccagaagttaatttgtaattccttaatcttattttcaaagatttctaaaatttgtttatccttatcatgtgagatacgttgattattaaaatgattgaaataaaacatgtacttttccaaactttctctaactttactaacatcagaatcttcattaggtacatatttatcacatctataattattcctatgtgcagtccaatcacctaaacaaatccaacaaaagttatatgtacatgatttacatgtcatatgattacaaccaccatttttttcaattaatgaatgacatctaggacaatctttggtatttgtttgaatccaattaagtgtttctgaatcatcttcacatttgattttccataattgcacaactttacagggacaaggtgcatgtgcagtttcattacaaccaaagcaaaattgatgattacttttgcatctaactaatggaatcattaataatcgtttaagctcttcaatatttgcaacaatatcggagtcaaaacctataaactgtacaacattatcacagtcaggaaatgggcaatgtttgtatttttttgtgttgattgtacaatatcgactacctatattataccaatattttgatattatagttctattacgcttcttatcgatttcttcacgttctcgttgttgaataatagtatggaaatcatatactagttcatcaattttcatcttctcctttgttttaaccgtgttattaaaatcatcttcaacatcaagttgttcatcaaattcaaattcagaatcactgtccaatttatacatctgctttatttgctcttcggaaagtaagtttacattcctcttgttttttatgataaaaatgcttctcttccattttattattgtattcacttagcacatttaactcttcgattgttattttaagatgacatttaggatctgcaaatggacattcgatggccatactaccagattcatttttgtttttcacatattggatataacagtccgtacaaaacttatgtttacacccatacattgagaaaaaattcattggttcatcctttgtggggccacaataacagataccacaaagtatattttcatcagtttcggtagatattaaccttgacaggtcttcaggaaattttgcttcataaataccatttttgagtaaatactcttggtgatttggggcattcatgtacatatccagcattttgtgttcattccaagaatactgtagcaataagttcaaacattttccataatctaactgtaacatgttttgaacttttttcacatctttctctaattctttttgtatatcatctaatgctatatttctgtattttagtctatgggtaggaataccacctgaagttctacttttgtaaaatgaatatagtatttcagaagatgagtctgtgtttcctggaccgtcatcaaattcgtactctcccgaatcactaatatctacagatgaaagctcatttcccaaaacatcttcatcaactccacttagttcaatagatgagttatcactaaaatcctcaaaatattcatcatcatctgtcataccaaattggtgagtgaagtgtctactagaggaaaaatccagaaggagttttggcatgctacactgtgactaagtcgatgaagacttgaaatcatttactgagcccgcgtttttatgaatgttgagcacaaaaagtaaaatgtatcttgtcaaaatttgagacattcctgaaaataacctttgtcaaaataatgtattcacaatagataacttcaaatgcgtgtctagctaaactcgaaggtaaaattactcagtaaatattacatataattgtttatctatattctataaatacataatttcccactacggtctccacaaatgaccatattatatggtgtgctaacataacacagagcacgtattaaatcagaaggagaacttatttcctatttttgaaggtatcccaatatcccttttctcatcatgattcttatgttttaaattttttgtgctttgatgaacaaaacttaaagttgaatttatctgtgtttctgaatattgaggaatatcatcagtttgaacagttccattcgagctagaaactagatgcgtatcacttacatcttttagtccccaatcaataatttctttattatacgaggcagttaataatttaccagattgattgccataatatgaataactaattgaagtgttactgtgattttgcgtaaagctgttcaaattatcgggttcatagtatacctcattaataatatcatcagtgacatcaattactaaataagcttctgcagaaaacaaccctttatcataagaacacataacttttcttggtcggccactattaacatcccaaatgacgacatcggcattaccagttccaccaacaaatgcaattgtattattattttctttcttgagggagttgacagtattattatcactaaaaaaatcatggaaatgaaacatttttgtaattggataagacttgtacttgaacttagtagattttatacatatcttagcatctatgtcaattagatcaataattcctttatcagacccgatgacagcccatttttgacttttatcgacaactagtgaaacagcgtttccatgaagtatattgtttggatattcatacaccacaaccatagctcttatatctatacctattaactttgatgtagcagtaatcatgtatagacctgtcaggttatcactcaaacaaaatgtaagattagtggcatatttttcagctttatctaatttataatgtcttattaatgttattgatgttttctgatatctatttttgtcatcattatcaaaagttccaacaaaatcaactctatagatatccacactaccatctaatttagagacagcaaaacaatttcttcctggcagtcatacataatgatttaataggagagcctaggttgacagataaacatgaatcaccagtaacatccacctctaacctgtgggtatcccatattttcaaaaatccttctgaatcacatgatataaaaaactcgtgttgaggtgcagcaacaatgtctacaatcgaagaattatgctcaatcaacatagcaacaaaaccatcatgatggtgtgagatgtgattagtattttgtgaattttttttactcattaaatttgtgtcaataaaacggccaaattcaggataatctccaatttctggctcaaacttaataccatttaaaaactttaatattgaagtatttttaccagggtaactaattctgacatctgaatgaatctctttcagtttcatcgtttcatcaaacacattaccttcaccaaaattatcaaatattgagttctcattacttggtaagtgaatattatttgtatcagatgaataaacggatttatcacttgtcatcactattggacgtggagcttgtagatttttcagaatgagtggttggtttttatttggatcatttttagagcttaaagtattaatgtttagctgggcaaactctttgatgtcactattttgttgctttgctgacttgtgtatatacttatgagtcacatcaataaaaacatttcttggagcaagatgtaatttctcagagttaggtttgatatttgaacgatctgatattgagtcttgttaatttataaatatatgatctaaaactagcaatcttccatatatctgctgcatcaagtcccaaactaatgatttgacctaaaaattttaaatctgtattactcaatggaacttgataattcggagtgtatgtgtcggcttgcaaacttttatgcaacccatcccttgattctaaattcccttcattctttctcaaaaactttaacttgccaataccaaacatgtcaacatctctgtacggattattggtagatgattttttccaaaataaactttcttgatttgacaaacaccaaagttttcaaagtttcaaatacaacacgtgtaagcggttcatgacatgaaatataaatattcttccaagtgaactcttctacttcatgctgtagatatggtcttacgataggatatagcaaacaataaaaatccgcaactggaatttgacttgatataacaataataagtttcaaaattgattgacgaactaaaccatttggatgtataattaatattactgataaattgagcaagtcagcaaaacattcatgacgtatcattcccaatgaaataagttgagatagcgctctcaggagagtaatcactattgtttcttcaggtccataaattgattgtagtaataaaggtaagatatattgttctaaactggtcacaccaacaaaaacagacaatggaacaatactggcaacaaacgagagttttatttgtgggtctttatcattcaagtatgtaataacatgacttaaaattatatcattagttttttgtttcccaaaaaatggacataatggctttatattctgcatcaatgcaattctaacataaacattgctgtcagtcaaaatttgagttgttaaagtttcaaaactctcaaaatttgagtcaaattccaaatcattcttatctctttcattgaaaattatactatcgatatcaggatcatgataagtaccgactttgtttttcaaaagtatcgagagttcaaatacctttttagaagacattgctaaatatggtaaacatgcagcaaatatcattcttacataatttcctgacttgatactttttctttcaatattgtttgagttgcttaaatctgaggtattcatcatatctttggtctctttataattccgaatatatgatctattcaaaaatacttgtaatttaggtataatatactccgagaatacgtgaatgttaattggtgtaattgtatctatcatcatcaacatttgtgtaatacatattagtgcagaaacttgaacgttttcactaggatcgtcaagcatattaactaaatagggtaaacatcgatcaaacttcgcttcatcgtgtaattgctcactaaatgctagtattaattcacatgccttaattctgtatgaagagtgtgttgtgtttctaacatttgaattcaatagagataagaagattaaagatccaaaatcattgtacgaattctttgtaataatttttgatgtagcccttggtatatgtctgttcattccaggcaagttcaatttaacggggattatgttgtcctgcctattcgtagagttatttgaattgaattcatcagtatcaataatgttagttttaaatcctaaatacaatgcaatcttatcaaaatctttgtacattcgatcaattctataatcacacttttgaaaattgtttccttctgaatttgatgaagaaggtgagtttgataaagtgttcatgtagctgtaaagaaaagtgtaaaagtaatcaggaaataacgtcttacggtattcggataagtattcttttgctgtgagtctgtcggttggatttaagctgatcatattttgaaccaactttttgatgtttgtatcttctatggaatcgagttttggagaatattcaccctttttatatttgaacatttgaggaagagaaaataaaggtaaaccatctgaatataattcagcaatcacacaacccaatgaaaatatatcaaatccaggtaaaagcttattattatcagcactgatattatctaattcctcttttgttttaaatctttccggtgcaatacaacatgaatgtctttgcactgtatcaaaataaaatgaaaagtgtgtttgattataatctggtaaatataccggtttgaataaagcaatatcagatagcataatcgaattccacgatgttaacaaaacattttccgttttaatatcaccatgataaacaccaacatcatgcattttagataatgcaacaagtaattgatatactatccattttttttcaatattttcaaaaaaaggtctaattgataatctatcatatagattatatcgcacataaggtcttatcaaatatgtagctctatcagaatcaattaaagtatcaaatgctaatgtattgggtatattttgtaatttttgtttgacttcattaagtttatttaaatatggtttcatatcaatttccacacttgaaggttttataagtaattttgtcaccacatatccttctgatgataaacattgaatggttttcaagaatcgtgatgtacctaaaggtttaaaatattgtaataacggtaggaaatctatataagcagatatggcaattgtatgagcagtaggtgaaaccaatgaaaaatcaaactccagtattatgaagagcttgcgcattaggttcgttcataactaattatctaatttgtagtttgacttcctttgtaattgtcgaagaaaatagaaataaagcagtatatcacaagtcaatacaccagcttaataataacaatcgaaacatgaagcatcatgaaaacatgaatctcatcaacggctcagctatcgcaccttcctaatcgggcagaatcacattccctcacggggacgaatcttaaatgtagtcttttcgtatactttgatactgtgtttcttataggttacaaggtatatttctgcttctacaagataatttactgtaagcacagtaaataaatagctcagtctttgctttataaattttttagttggctacaatatcaataatctaatttctctatgactatcaacagctttttatataaggatggatttggtgcacaagctttctacaacgctaaaaatgcgttacatggatatacagatactaatgtggctaatgagactaaacatagtaatacctatagtactgttgaatcaagagcacaaaaaccatacgataatagagttccctatgaaaaagcaaacttcttgattgattctagatatagcgttcaacatattcttggtaaaggttccgtatggtacagtttgttctgcaattgatcttaattcaaaggataagtcttcattggctattaagaaagtttgtaatatattcaataaggaagttttacttaaacgtgctatcagagaattaaaattaatggaatattttaaaggacataaaaatattattggtttagtggatttagatatagtttatgttaaaccatactgatgggctttattgttttcaagaattagttgattatgatttaggccaaagtcattcatagttctgttcaattttctgagtttcatattcaatcttttttttatcaaatttgttgtggtttgaaagtatattcattctgctgatgttatacatagagatttgaaagccaggtaatattttagtgacattctcaaggatgtttgaaaatatgtgattttggattagctagaggtattaatagtagatacatgaatcataatcataaaagtagcaatataaccaattatgttgctacgaagatggtacagagctccagaattaattttatctagaaagccatactggtaaagccgttgatatttgggcaatcggatgtatctttgctgaacttatacagtcgtaggaccaattttcattggagatgatcagattatgcaaattactgaaatttgtaaaattattggagcaccaagtaaggaaattatatttagttatggaaccacaattgcatgggaatttttttcagatcccaaacctaaatttcagaagaaggaattggagtgatttatatccacatgcaaataattatgcacatgatttattagataaactggtttgttggaatgttaataaacgttatacaatcgatcaaattttaaaacatccatatttgaaaaaagttagtaatccagatgaggaagttgttatggatgaaccatttgattttagttttgaatggaaggctaaaacattaaatgatttaaaaatggtattacatgatgaagttactaatttcaaagagaaaaagcaacaaatagattttaaaggtatgatgtaataatttatataaaagaaattttaaacttgtaacgaatattttaactaaatttaaattaacacacaataattattatgatatttttgtgaatatattaaattgaatattttgtatatttataagtaaaaaatgaaatgtatctataaaaaaagtatctattaagggggtatagtttataaattaaatgatgtaaaatgatgtaaaatgtttattaataaaattcaagcgtattgataaattgatctagttcctgagtctggaataaaacttaaattaagttgttgaaatttatcagtgtatttatgatagtaaattccttcgaatgaaccagttgattgattaaaacaaatataataaaatccagcaaatgaagcacctttaatacctttaacagttgcatcagggtataaaaataattctttccaacgcataaaaatatatgtttgtgataatgaattattatagtaattcattattactcaaatcattattcatatttatattaagatctctccaagaagggaatcttgcccaatgttgaatatcatttacgtatatttgattcccattgaggattttcagtaataaaagaatgatgtttaccaataatttcacctttaaaaaatgttgtaattgttggatttgaatctgttagattataaattgttaaaaaccctgaaataaaagaatcttccatattaacttcagttaattttacgttaacttcgtaacgtgaaaatcccgattcctgaaatccagtgaattttgcattgggttttaagtatgaagtattccagttgtttttaggctttggtagtgacgggttgtggtataggtgatactaacttaaatgattgatttttagagctctgaacacttaattttttaacagatacagggtctattttctgatccttcttaacaacattattatcaacttgatctttctcttttataatctgctctaccatatattaatactccactatctagttataaaatagactaaaataaagaatattgtcaaagttgtaacaatagaaaaaagaaacggtgatctagccaaaaagatgattttccacagaaacaataaaaaaatttttgttatcgcggtgctaatgccgccgataagagaaaaatggcatttttttcatcagccagttgctgagtcatggccaggtaaaggttggtgattcgtacaatacttcttttcaatacaagtatagacccatcaattaacacacgacacagcagacgattctatgacacaagaatctgaaataccgttactcttggatgaaccagtatcaccatcaagtgccaataccgctaaagatatatttgcaggtacaatgggtggtattgcacaagttttagttggtcaacctttcgataccactaaggttagattacaatcctcatcaaatccaaatacatcaccaattgaagttgttagatcattattgaaaaatgaaggacctttagcattttataaaggttctttattaccattaattggtattggtgcatgtgtttcaattcaatttagtgttaatgaatatatgaaaagagttttcacatatattaataatggaccaggtaatatgacaattggtcaatttttcattgcaggtggattaggtggatttgctaatggatttttagcaggtccaattgaacatgttagaattagattacaaattcaaacaaagacaacatcaacaaataataatagtagaatttataaaggaccatttgatgttttgaaaacacttaaatgaagttggtggaattagtactatttatagaggtattgtaccaacattattacgtgaatctttaggtattggtatttattttatgacatttgaagctttagttcaaaattcaatgaaaaaaaataatttattaagaaaacaagttgaatcatggaaattatgtttatatggtggtttatcaggttatacaatgtggttaacatgttatccaatcgatgttataaaaagtaaattacaaactgatacattaggtaactggaaatataaaaatagtttatcagttgttaaagatttatggaaaacacaaggatggagagggttctttgtgggatttaccccaacaattcttcgtgcagctcctgccaatgctgcaacatttgttgcatttgaatggacaatgcgtttattaaactagaataaagctgtagtagacttgattccccagtattcagttctgtgcaattacgtaatacttaagaaattataatagtaacaaatttgagtcacaatactcgacaataatctttatcttaatgataatgattgttttaatttaggaggttaatgatacttctttttagaagatttataagtaaacaaagaaacagaatgaattttatggatccacaaagtgtttataatctctcaaatattcgagaagatttaattagaatggaagatacaattatctttaatttaattgaaagatcagatttttatagaaatccatcaatttatgtaaatgattctgataagattaaaataccaaattttaatggatcattccttgattggcttttccaacaacatgaaacaattgaatcacaagttagaagatatcaatcacctgatcaatatccattttatccaaatgttattaaagaatcatttttaccaccaattaaatatccaaaattattagcaaattattttagagaagttaatgttaataaagaaataatggaaatttatataaaggaaatgattccaagagttgctaaaaaggaaggtgatgatgatgaaaattttggatcaactgcaatgagtgatattataacattacaaagtattagtcgtagaattcattttggtatgtttgtagctgaagcaaaatttcaagctgatagagaattatatacaaaattaattaaagataaagatattgatggaattgttgaaaatataacaaattcagcagttgaagaaaaaattttaaatagattattaattaaggcaaagacatactggtacagatccaacatcacatgaaagtaataataaagttcatcctgaagcagttgttggaatttataaagattgggttattccattaacaaagaaagttgaagttgaatatttattacgtagacttgaagatgaattttaataatgctgggaataatacttacttaatcttgatataagaaactatataaaattaaacaaacactctttaaaaagcaataaatacaaaaaaataacccctgaccctacctttttaattcgaaatttttcaatttagcttcatcatttaaattatcatcaacaattccacgtttataaaaatgatctaaaacttctctaacatcagctaaactaaaagacattgataattttctccaccataaaaatctattaattctatcttgttttgtatcacctaaaccataatttgtatgagcatgaaataaatcatcctctgatttttcatgaactgaaatatttgaacttgataaacttttattatattcttcaccaattaaatcatcataaaagtataaatgagttagttgtaaacaaccataaattgttaatgttaataaagtacttaaaataattgtccttttattatctttaaattcttgtttccaatcaccatttttagaagtattccaagatttatcattttgaaatccataagcagtttcataaccatatttatatttatcttcccaagtacctgtttcatatgaagtaaaatttgatttataaaaatttgattgataatttgatgaattatgattacgatattgataacttgaaggattatacatatttggatttgttcttaaattaatattatcattccaaccaattttataattatcataatttgattttgaaattggatttttaagtaaattataagcagataaaatttttttaaatctttcatccttaattttatcattaattgaagttattgaatgagaatttgaatcaggatgataaattttagcaaatttaaagaaaattttctttaattgttttggatcaattgaatcatttgattttatatttagtatatcataaggtgaagcattttcatttgtggggtatgagttaatgattaattcaatatcattatttaatttatttgaatttgaatttgaatttgaatttgaatcaggttctgttatttgagcataataacggttaaatcggagataatttttagtgtttgtagttgtaccataatgtgaatataatttatttaaacatcgtaagttattgttatatttattcaataacatgacgataattcagagaaagatataaagtgaaaaagtatagtataatttaaataataataacaatttacagattcattccccattaaatacataatgattcaactatataatatcaatttaaaaagacattgccttaatcaattattaaatctaatatattaaagtttagtagactgttactataaaaaaatgctcataaaccggggattgttccaaatatggtgtattatccgacggagaagattacgtaagatgtattacggaaccttgttaactaattgaattgatctttgaggagccaataatataatgggtggtggaaaataatacggtatatataccagtgaatatttctttacaagatatacacaacaaattacaataacatctcaaggatatactaaagatcaccatcattgaacattaatctaacaattaaaatcaaagaccgttatgaaaagaagagataaatcgataagaatgtccatctagtcccatcgactcagacagtaacaagtaaagggtcacgtgccatacacgtgaccgttacgtaataatattaaatacataataacagttattagtcataatgataatgataataataataataataataataataataataataataataataataataataatacaatagggttcacaaaagtccgttatcgggaaactaatagtattaatatggataaatgggagaatctccgggattgattttttttttaacaaaattattttttccattgatatcgataattaatacttatatcttgatcagtttcgtgttttttttttccatttacaacttattttcctcctcttttctttgcttttttttcacttcttaattaccactttcattaagcaaacaccatcttacagaatgagtgaaaaaattgaaaagaaaccaattacattttcaaatcttttattaggtgcaggtttaaaccttgcagaagtttcaactttaggtcaacctttagaagttactaaaactacaatggcagcaaatagagattttggtttaattaaatctgttaaacatatttggaatagaggtggtgttttaggtttttatcaaggtttaattccttgggcttggtttgaagcttcaacaaaaggtgcagttttattagctgttatgactgaaggtgaatatcaatttagagttttaggtgcttcaccatttatttctggtattggtggtggtatgcttggtggtttatcacaagcttatcttacaatgggattttgtacttgtatgaaaactgttgaaattactcgttcaaaggatctttcaaagagtactttacaagttttcaaagaaatttatcaaaaggaaggtattaaaggtattaataaaggtgttaatgcagttgcaatgagacaatgtactaattggggttcaagatttggtttagctagattagcagaagattggattaaaactttatcaaataagggtaaagatgataaattaaatgcatttgaaaaaattttaagttcaataattggtggtggtttaagtgcttggaatcaaccttttgaagttgctagagttgaaatgcaaagtagagttaatgatccaaatagaccaaaaaatttaactgttggtaaaactttaaaatatgtttatcaaactcatggtattaaaggtttatataaaggtgttactccaagaattggtttaggtgtttggcaaacaattttcatggtttcattaggtgattatgcaaaagaatatattgctggttttggtaaatcgaaagctttgaaatagatttaataattgatacttttgataagtgttaatatttactactttactaaacttatataaaataataataaaacaaaattagaattaaaaataataaaatagtatttaaaacgattgtagatgtaaatgatgatatgattttatatatgattttatatgaattgatttgatttcagttaatgaatgactttagttagaaaggtatataaagcgtttttttttttgtgtgtgtgtgtatgcatgaatgcaggatagaagtgatctcatctttgaactccccatttatcataacaatataatccaataaatgttaatgataaaccaaaatattgttgaaaattaaggttaataccttcaattataattgaacatgaaataattataattcttttcaaaatatttgcaattgaataattgacaggtgaaaccatacctaaaatttgaaatgcagttaatgattgaataaaatgtgaaattccataataaataattaatttacaaattcttgaatttaaatttaaaattgataaatttgttaaacttgaataattaccaatttctgatataatataaaatggtaatgtaagcacaaatccaacaattgaacaataaaataaaactgataatttatctaattttttattattagttgattcatgtggtaaatattttttatttaattcagttgatgaattattaactgaatttggtgatgaatttaatggtgatgacatttgatattcaaattcattaatattaatattgatattactattagaattattattattttggaaattaaaatatgttggtctaatattttctcttggttgatatgaatcaattgaaactggtaaaagtggtgttgaaattgcagattcaggtttagttattttccaattaaatctacttaaaaatgctttagctcttgattcatcatcatcatcatcattagtaaagctatttttcctaattttattatagatataatcattatttatattatcattatcatcagcagtagattccttttcatcatcccaagttaaaatttttttagcaaagatattttgacttacaaatatcaacattgaaataaatgcaaatattgcacctttaataaataaagaatttgaaatttttaaattatcatttcttgtacaagataacataacaccagtaattaaaggtattaaagtaatataagttttatattgaaattttttattgaaaaaaaatctataaattaaaactgttgttaatggagataaagctttaattgtatgaactaatgaaactggtataattgaagttgaattatgacttgcaatttgacctaaaaattgaaataaacccattggtatagttgtttttaaaattaattttgaaggtaaaaggaaattatttaaaattgaatattgattattaattaataaaggtgggaaagtaccatttgggaaattttgatgaatattaattttacctaattgataaaataatttaattgaaaataataaaattaaacataataaagcatttataataaattgaatttcagttaatgaaacaggatatttaaaatcaattaaaatttgttttgttgttgaagatgaaataactgaagtaaaataccaaataaagcataaaaatattaattttaaattaaaatttggtaaattatttagaaaagtatttaaattgtgaatgggcacaataaataacttttttaacattgaattattttagattaatgttaaaaaatgaggtgagatgtgctattaaagaatggaaagagagtaaataggaagaatatatgaaaatgtgaaaattaaaattcaaactttaagtcaaaatccaaaaaattcatgttggtgtttctttctgtttactgtttactatttacgtttccattgttaactgaaattgcactatatcacgatattctagaatttgccttaaagagaaaattaaaaatttgaaaatatagaaataattgcattacgtaatgaaaacacgtgactgtcacgtgattaaaataagttattaagttattacgtaatccttgtcattacataatcaaaaactattacgtaataaaaagaaaaagggaaaaaaaatgttgggcagaaacggttgatctcttatcctagtaataataataatctcaccgagaatttatttagctattaacatgattttttattattatttattgatgattatattttgtagtttctttttacaattttattttgacagtttaatactaattttatattggtctattatgaaccccttttcttaaatatttcatcctatatctcttcttgcatctcttttttattttcttcctctttccctttctctttaaccatcttttatcactgattgatcttaacccttttatcatgtcatctgtaactatctcaaaatctgttactaaaaatttatctgctgttgatactttaggtaataaattcactgctcctgattatacaattaaacaaattttagatgcaattccaaaaaaatgttataatagatatttaacttcatcattttattacgttttcagagatattgctttatgtattactttcggttcaattgctcaatatttaattccaaaaattgataattattatcttagagccgcttcttggttaatttatgcattcattcaatctttaccttatactggtatatgggttttagctcatgaatgtggtcatcaagctttctctgattatggttgggttaatgatactgttggttggattttacattcttatcttttagtcccatatttctcttggaaatattctcatggtaaacatcataaagcaacaggtcatttaactagagatatggttttcgttccaccaacaaaggaagaatttttaaataaaaatcatgttatttcattatctgaattatctgctgatgctccaataattactttcaaagatttacttattcaacaatttggtggttggttagcttatttagttactgatgttactggtcaacctcatcctgaattaggtaataaatggtattcatcattatttgcttcacattttaatccattcatctccaattttcgaaaagagagattattggtttattgttttatctgatttaggtatgatttcacaatttttcatactttatcaatggattaatcattttggttggtttaattgttttgttcattggtttttaccatatgttttaactaatcattggttagttttcattacttatttacaacattcagatgttactttaccacattatgaagatcatgaatggaattttgcaagaggtgcagctgcaacaattgatagaaaatttggttttattggtccattctttttccatgatattattgaaactcatgttttacatcattatgtttcaagaattcctttctataatgctagaattggtacaaaggcaattaaagaagttatgggtgatagttatgctttctctgatgaaaatatgtgggttacattatggaaatctgctagatattgtcaattcgttgatggtaataatggtcttaaaatgtttagaaatgtaaatggtttaggtgttgatccaactaaataatgttattctctttcttattcatataattcttagtatctattattgtttcttatccttatatatatctaaattatatagaaaattataaatttattaattaattatccttgttttttattttcaaattacatacccattggatttttaatacaataacaaacagttattggcattgaaataaccaatactaaatattgtaaaatcatatataaaccaacacaatttaatggagtacaagttttatcattaggtttcattgcagctgcagttaaataaatttgaactgttgcacttggtaatgcatattccattatacaaacgaaaattgccattggatcatcaatccaaccaatatttttcaatcttgtaataaaagctgtaccaataattggtaatatacataatctgaaaattgtatgacaaactgcacttttccaaaatcctttaggtacttgattaaattctaatctagctaaaactgatccaattaataataatcccattgggacacatggatatcctaaatattctgcatataataatataaaatttaatggaggtttttgatttggtgcattaggtaattgaacagtacctgtttcaacaaataatgcttttaaccaatggaattaatgaaattataattgatataactaaaagcaactgaatttggctttttgaaaatttgataaaaagaaaacaataaaacctaaatgacatttatttcaaaaatttagttaattttatttccaccttcattttcatttattttagcatcagttatatttgtttcagttattaattttcattgtagttgacatattttgattaaatggttgaacatgagaatattctctaataagttcttgatttaatgatattaaatcatcatttgattgattaattgaattattttcatttttatttaaatttctagctgatgcaactttatataatgcaatattagaatgaaaaatgatttatttgttaaaactctacttaaatgtgatacatttgatttaatttcacttaatggtaatggatctaacttttcactaaatcttctttttctggttggattgttaatagtattagaatcatctgacattattgatgatgttggagatattggactttcacttgaaaatgattgtctttgttgttgttgttgctgtaaagaattactatgtgagacttgatgaagtctctgaatctattgctatatccatatgatcattattatcattatctttattattattatctattatcattaatttcatttattttcgatattttcctcatctaatttatccttatattcaaaatcccattcaactaatttaaataaaccacaattaaattgtactaaaacatacattgctaaccaaataataacataagcaggtacctttattttgttgatctaatgagaaaattgtaacagcttgaatataagaaattggtaaatcagagacattttgcattataccagctaataaagcaccaccaacccatctattatttgaatttttcggtattggagtaaaataaacaattaaaattgcaatacatgaattaatcaaatacattataacagcacaaaagcaaataacaccaattgttttaatatcactaattgaaatatatgaaacaattttatcgaaaactaatgaaggcatgaaaatcatcataaccatatcagagaaagctcttgcagctgtaacaccgaaaataacctttccttgtaaggaaaaatcctgaaccaataatcatatacattcgtatcatcggtataaccgatgaatatactatctcacctaatggtgcccctgccattactcaccaaaaggaaagagatataagtgataaaattaatgaaaattaagaatctgaaaaataaatttatcaatcagtcaatcatgttactactgatcggtctcgcggagttagataaccgaataaatcatttatttcaatgataaatagtgggtaacgatacccgttatattgtaataagtagggattataataggataaggggaagtatattgtattgtattatattaatcatagttatcacacataactcctttcctactttacttttcctccaaagtatgatataatatataatataatacagtatatctctccactgataagaaagaggctgatcaagcaaaagattagctaatatactaatactagtaaaaatgaaaaatttttccaactgctgacactcaaagtctgtttattatttaaatttatttttggtgtttgtttccgttgggttgtagaatttggatcaaaattttcatttatagttgttttttattattttacttctttacttcctcttctcttttattaagtatatattcaatggcttcaactgctcctgtaacctactaaaaaggttactactaatcttcatgcaaaggatttaaatggtaatgatttccaagcacctgattattcaattgctgaacttattaatgttatcccaaaagattgctttaaacgtgatttaattaaatctttatcattcgttttccgtgatattttcttccttatcttattcggttatattgcaaatactttcattccctcaaattccaagtaaaaatttaagatttttagcttggtcaatttatacaataattgaatcattcccaatggttggtctttggattttagctcatgaatgtggtcatcaagctttctctgaatatggtttaattaatgatttcgttggttggattttacattcttatactggtaatccttatttctcttggaaaatttctcatagaaaacatcatcaacatactggtcatattgataaagatatggttttcattcctccaagaactaaagattggaagaaaaaacataatgttttatctttaaaggaagttaccgctgatgctccaatttcaacaattattaccttaattattcaacaagttgttggttttcaaacttatttagcaattgatgcaactggtcaaaaacatcctgaattagaagaaagatggattgatcaatttaaagcttcacattttaatccaaatgctcctattttcgataaaggtgattattggttaattgttttatcagatttaggtattttaacaactttattcgttgtttatcaatggattattaattttggttggtttaattgtatggttcattggtttatcccttatttattagttaatcattggattgtcttcttaacttatttacaacatactgatattacagttcctcattatgaagataatgaatggaattttgcaagaggtgcagcttcaacaattgatagagaatttggctttgttggagaatttttctttcatgatattattgaaactcatgttttacatcattatgttgcaagaattcctttttataatggtagaaaggcaacaaaggcaattaaagaatttatgggtgataattatagacatagtgatgaaagtatgtttatcacattatggaaatgtttaagatcttgtgaattcgttgaaggtgataatggtatcttaatgttacagaaaccataataatattggtcttactccaatcgataattaatttatacctactccatctatgtggattgatggattgttagaaaaaaaatgttaacattcatttaagtctcttttcttattcattcattcatttattcatcattcattctttgtgattttttgtattttgttattttattcttagattattagattttactttttctttcatatttctcaactttactatatttattttgcaaaatatttagatattttatttttatatttaattaatattgaatagtatattataaaaaaaaatagttatttaaacaacgggtatatattaataatcatacaggcatcttagagaaattcaattacattttgaataacattttcattcatatttttaccccataataaatctaaatgttcatatccattaataccgaaaactcttaagttcatttaatttatcacttgaatttacttttataacttcagtttcactattattatcaccataaccatattcttcatcatcatcattttcaataataacttcaacattatcataaattttctttttaccaacaattttaccatctttaatttgtgttaattgtttgattattaaattcaggtaattgattaattaatatatcaatatcaactaatgaatcattcataccataaattattaaaattttagatattttaatagtttcacttgttggatattcaaatggttgaaaataatctctttcttgatacatttgaaatttttttgatttaataatttgaaaccaatgaacaacacatttaactgatgttgttgaataaagatgataataagaaattaatttttgaattatatcaatatttttacttttccaattaaataataaatcatttggtaaatcaattaattttataaacattggtggataagttatatttctccaaaataaaactgatttcattaatatttttttaccaaataatttataaattaattcaggatcaaaattaataattgaattaataagccaattagataattttttaggagttgttgcaggtgcaattaatactaatttttcaattttattatttaaatcatcattaattgaaacagatgataaaatttgtgaacaaccttgactaaatccaatataaattaatttttcaatatttttcaaatttaaaatataattaattgatgatggtatatcatacattgcaaattcatcaattgaaaaattccaaaattcaacatcatttggattatatttttcatgtttattagaatatttattacctctattattaccaagaaaaacatcaaatcctaattcacataatctaaatggtaaattatcatctttattaaacataacacaccaaacatcacttgtcattaataatccatgttggaaataaactgctctattatttgatttaaacccatttttagttggatcaagtctataaatagtcaatttaaatccatcttgagttggtactaaatgagattcagatataaaaccatttaattcagcaattttttggaaactttcaaaatttcttaattgttcaactttatgtaaaacttcatcacctaatttttcattatcagtttcatttataaattcattatatttttcattattagttttgaaaaatgtaaaaatgaatttacttaacattgtacaaatgttgataattgattttggtaataaaattgtaattgatgaaataatttgttctaaaataattaatgaaattgaaattgcattctcaactttttgtaatgtacttattctttcattatcaataatattagtattttcatcaatattagcatgtctgatattagcatcatctgtaccatcccgtatcatattatcattttccacaacagattcatccccgttttcattattaatttcagtcaatgcattaagtatatttcgttgagataagttaattggagatgcattaatattttcaacttgttcactcacagattttctatgtgttctccttttaggagtggtcaattggagatatcattccttgtgtcccgaatgaagtaaagaaagatttgagttaaaaagaaagggtgcttcttaaatattaatttaaattattgatattgacatgtactgtaaatataactgcccaacggtggctcatcggaaaattccctttaatttccccatttaatattccgcgcaaaaagcacactgtaaaagacgccaatttcccgaggggttcgtccactttagtgagtaatacaataaaataattttaaaataattttaaaattttactactgaaatttcaacaccttttccacagtacatgaaattcacatcgatgaaattgcatgttctttgagaaatcatttctttctttctttcttgatttcttctatttctcttctctcctttccactagacaatgtctgaagaagctgaacaatctgctcatttctcattcccaagggaagaagaaaaagttttaaaacattgggaagaaattgatgctttccactacttcagttaaaattaaatgaagataaacctgcatttacattttatgatggtcctccatttgcaactggtactcctcattatggtcatttcttagcttcaactattaaagatattattccaagatatgctaatatgaatggtttctcagttgaaagaagatttggttgggatactcatggtttacctgttgaacatgaaattgacaagaaattaggtatctcttcaaagcaagatgttatggatttaggtattgataaatataatcaagaatgtagagatattgttatgagatatgcatctgaatggaaatatgcaattacaagattaggtagatggattgattttgaaaatgattataaaactttatatccaacttttatggaatcttgttggtgggcttttaaagaattatataaaaaggaagctgtctatcaaggtttaagagttatgccttattcaactggtgttacaactgctttatctaattttgaagcaggtttaaattataaagatgttaatgatcctgcagttactgttgctttccaattagctaatgatgaaaaaactttcttagttgcttggactactactccttggactttaccttcaaatattgcattatgtgttaatcctgaacttgaatattctaaaattttcgatgaagaaaaacaagttacttatattatgttagaatcattaattaaaaacttatataagaaaccaaaggatgctaaatttaaaattactggtaccatcaaaggttctgaattagttggtttaaaatatgttccattatttgattattttaaggaaaaattcactgaaactggttttagagttattggtgcatcttatgtttccgatgaatcaggtactggtattgttcatcaagctccagcttttggtgaacaggattttgatgaatgtacagctaatggtgttatctctgaaaaattaacccctccaaaccctgttgatgatgatggtaaatttactgatgaagtctctgattttaaaggtttatatgttaaagatgctgataaagaaattatgaaacatttaactgcaaagggtaatttattattacaagcccaaattagacatagttatccattctgttggagatctgatactcctttattatatagaactgttccagcttggtttattagagttaaagaaattattccacaaattcttgattctgttaatgaaactagatgggttccaagtaatattaaggaaaaaagatttagtaattggattgaaaatgcaagagattggaatgtttcgaagaaatagatattggggtactccaattcctttatgggtctctgatgatggtgaagaagttgtctgtgttggttcaattgaagaattaagacaattatcaggtgatgattcaattactgatattcatagagataagattgatcatattactattccttcaaagcaaggtaaaggtcaattaaagagaattgaagatgttttcgattgttggtttgaatctggttcaatgccttatgcttcaaaacattatccatttgaaaatgcagaaaaattctctaatgcattcccagctaatttcatttctgaaggtttagatcaaactagaggttggttctatactttatctgttttaggtacccatttattcggtagagttccttataagaatgttatcgtttcaggtattattttagcaggtgatggtaaaaaaatgtcaaagagattaaagaattatccagatccaaacttaattacaaccaaatatggtgcggatgctcttagattatatttaattaattctccagttttaagagctgaaactttgaaatttaaggaagaaggtgttaaggaagttgtctctaaagttttattaccatggtggaattcttataaattcttagaaggtcaaattgctttattgaaaaaaactgaaaatattgattttaaatttgatgaaaattctaaatctgataatgttatggatagatggattttagcttctttacaatcattaattaaatgtattcatgaagaaatgggtgaatatagattatataccgttgttccaagattattaggattaattgatcaattaactaattggtatattagattaaatagaagaagattaaagggtgaaaatggtattccagattgtttgaaagcccttaatactttaactgaaactttatttatcttagttagagcaatggcaccatttactccattcttatctgatgcaatttatcaaagattaagaccattatttactgaagaaactttaaataaatatggtgttgatcatagatgtgttcatttcttatcatacccaactgttaatgaagaacttttcgatgaaaagattgaaactgctgttggtagaatgcaaaaaattatcgatttaggtagaaatattagagaaaagaaaacaatttcattaaagactccattaaaggaattagttattttacattctgataaagattacttaaatgatgttgaatctttaaagaaatatattattgaagaattaaatgttagagaagttatcattacatctgatgaagataaatatggtgttgaatatagagcagttgcagattggccagtcttaggtaagaaattaaagaaagatgcaaagattgtcaaggcaggattaccaaaattaacatctgatgaagttaaagatttccttaaatcaggtaaagttactgtttcaggtattgaattaacatctgaagatttaaatgtcttaagaggtttaccagattctaaaactttatcaggtcaagaatcaagatctgaagctgatgttttaattattctagatattaatttatatccagaattagaaactgaaggtattgcaagagaattaattaatagaattcaaagattaagaaagaaatttggtcttgaacaaactgatgaagttttagttcaatatgaagttaagaaagatgattgtgatattgaaaaagttattaaagatcattcagaaattttacttaaaattactaaagttccaatggaacatatctctgaatctgataaaactatgattggtgaagaagatgcaactatcaatgatactgtcattgcattaagacttctcaaattataaattctctagtttccccctttatatatagtttaaatattttataagaataatcatttcattttaaatcataaaagtaatgtcagtagaaactgacagaaacaaaatagatttgaaaatagttacccgcactttgtgttattttttttttttcggtgaaatcaaaatagacatgcttctgtagttaagattaagtattgaatcactaatccttaacttaacaagtacatttcaataactattcacagttttattaagtttaaaaacacagttgaaaaaaacttgagataatagaatgtcatttggatcaagattaggaggtttcggagctaatgtttcaacaatcagtaatacatcaactttaggtaatacaacaacagcaacaggttcattacaagatttacaaaataatatagtggttccaaatataggtgatgatagtgtaagtgatatagcattttcaccacaagctgaatttatggctatttccaattgggataaaaaaaatagaatttatgaaattacaaataatggtacagttgaaggtagagcattatatgaacatgaaggacctatactatcaacaagatttacagcagatggtactaaagtaattagtggaggtgcagataaacaagttaaattatttgatttagcatcacaacaagcacaaactattggtattcataatgatgcagttaaagttgttagacatgttacatgtggaccacaaaatactccttgtgttgttagtggatcgtgggataaaactattaaatattgggatatgagacaacaaaatccaatctgtacattaaatatgccagaaagagtttatgcaatggattcatcacaacaattattagtagttggtacagctgagagacatgtagtaattataaatttaaataatcctgatacaatttttaaatcaaccttatcaccattaaaatatcaaactagaacaattggatgttatccaaaaggtgatggttatggaattggttcaattgaaggtagatgtggtattcaatatgttgatgatatacaacaaaagcaaagtggattttcatttaaatgtcaaagagttaataaaacagcaacaaaggaatcaaatattttttcattaaattcaattgtctttaatccacaatttggtacttttgcaactgcgggttcagatggtacattttcattttgggataaagattcaagacatcgtttgaaaggtttcccatcattaaatgcaactataccagttgccaatttcaatagaacgggtatgttatttgcatatgctttaagttatgattggagtaaggggcatcaagcaaatacaccaaactataccaatacagttagaatacatgtatgtaatgaagaggaagttaaaccaaaaccaaaaaggaagtaaggatctttgtttaaattaaaataataagctgattttttcttcaaagacaattatgtttaattcgtgtaaaattctataaataataatgaaaattttgataaaaagtaaatgtatttataatatcgaaacaaagtagagagtaaatatacaaagttaagtgaatagaaaagtttatttgatttgaatttgaaatctcaaaattcagtagttttattaagaaaaggatatggatctctaaattccattcctttcaacattatcgctccagaaatcaggtaacatttcagagttatcttcagcagtatataatccgaaatcaaagaattgttcagagacattaagatcacctaataagtgtggatcatcttcaataccaaatccccctgtattggtagctggttgttgagaatcagtttctcctgccttggtaccggccttggcatttttctttgctgctccctttgtagcaggtttatctgcagcagcttttttagtagttcttcccttacgtatacgtttattatcaccagggggtggaatacttgatttatcattatttgaatctgtagtaacaccttctttaacactttcaagtggagtagttgcatcttctttaatgattggagttgtaacagatgaagatgttttcttctttgtacgtttagtagtattcgaagatgctgatgatgcaattatcgatccatttggacttaaaactttacccgtttgaggagttgtagggttgtttggagttgctggtgtaacaggtactgaaacagatactgagttctttctggattttcttggtttctttctaccattggccccactatcatttggagttccaccattagttgattttttaccagaatttggtgaaggttcattatttcgtgaaggttttgaggaaatattttgttgtaattgacctaacatattagaaaattcggcaaattgagaatttgtctcatttttactgctattattgtctttagaattagaactcatgtttgaacctgaattttgatttgaattggtattcatatcttgaagtctttttctattttcagattctaaaagtctaagattttccccatattccttaactccttcatttggataatttttcttaacgtaaccatttggaacttgttggttcatatatagtggttgttgtggttgtaatggtggaggttgatcaaatgaatttgcaggagttggagcttgtgattgtggtctagaaaatgaagtgaatgtcgttggactcatcatacttgaatctgttcttggtcttttatttgattgttgcgagtgtaattgctgatcttgttgttgttgaagatgttgctgttgaagtgatggtgggatagattcatttttcatcatgtacggagaagtagcattagcatagtttctattttgttgttgattttgtattatcttcctttgaatattttgatattgcatttgtccatttgggatttgatttgatggaattgattgatcaggtggaatttttccaggtggaactggaccttgtggaactggaccttgtggacttgaacgataattaaaattcgggctttggtttgcatgattattataaggttgttgattataattttgatttgattgactgtgtggtgaaaccccatttttagatgtaaaacttgaatttggatttatatatgaagcatttggatcggttaaatgaggtggtggttgtggaccagtagaaactctttgttgttgtggtcttgcaaaatcattatcattacttgatggtattccagaagttcttacatttggaggtaaatcattgggtaattgttgaataccatgaggtgaaccttgagataatgtttgtggtggtattccttgattctgtaggaaacgatgattgccttgtttcctttgattccatgcagcagatgatgcaacattttgcatttcatgtggttgataaccatgaggagtattttttggttgtccttgttgatttgggtgttgaatatgataaccaggttgctgatgttgttgattatatgcttgttgttgactataaggttgttgaggtggtaattgttgtggaggtaatgaaggtccttgttgtggtccttgttgctgtggatgaggaacttgtgaatgaagaacttgttgttgagaagggtacatagcaccttgtggatgaggaacttgtggatgaagaacttgtggatgaagaacttgttgttgctgtggttgttgttgttgttggtggtggtgtaatgaaggttgatgatgttgagaattgtacatattatttggactaaatgaactttgtaaattcatttgcattaatgaatcatgtttatcctttgttgatatcaaattataataatttgaagcattttgtgaactacctctatcagtacgagcattaaatatatcccaaaatatatgccaccattcataaataaaaccttcaggagtatccattgtcattttagattttggtaaaagaccttgctttgaattcattaattgaaatttatcaaatattttttcattattttttattacaggtacattagcttcattaagaaatgatgcagctgatgaattatatcccgattttaataagaaatcatagatataagcattaagtaattcctttgaattagcagcagcagaatctctgactactggttcattgactaaagattgattggcaagatgatttggatttgaatttgggtttgcatttgggtttaaatttgggtttgggtttgaatttgaaattccatttggattagaatttggattcaaagctggtacaggtatgctattattactattattattaacattattaacattattgcctttattaactggaacagtgttaatacttttctgattcccctgtatcagaacattattattgggcattgtattattgctattattgttgttgttattattactgttattattgctattgggagtactgttgctattattattgttattattattggaactattggaactattaggaatattacttgaattattattatttgaggtgggtacttgggaaccattctgcatcggtggctgtttcatttgctgatggttgtaattattattcttggtgtccattatgcgataatagatataccttctatgacatacacacagaaataggattatttgagataaacttttatcaagaatagattgctggtatttaaaatattaaaattatacaaatttaccacaatattattatcaatatctagcacagcatgtagttaatagtgtaaacaattttttgatgatgtttttccttgcattgtttgtcgctttcgacgagaatttacctggctctttattttattatggcattggcacggtgcccacgctgagagcttttttctcttgtttcgcaccttgcctcttctctgggtttattcctttagtgtgcatgtgggtgtagccagtggttcatatatcttggaattgtaattgttatagccactgactgttatgtgtttatccgctcttcgttagtacacagattattccccaatttttatgatttaaaccctccatacaaacctttttaaccccgataaactcccctaaatttccctagtattgtgttaaaaaggcaatcattgccttaattgggatataaaaaacggagacgcgacgttccgccggagtgccattgaaaatagtattacatttccaattacgttaagataacagatctggagatttgatacattttacaagggttttaattgtattgtttagtaaattacacagaatatcaaacttgtttgactttggtgactgtatctctggtgaaaagacatcctaatactgtaattgatattatacttacaattatggcactactgtaccatgcacttgggtaaacattccatgcaaactcatgaatgaaaaccagcaccgccacggtaccaacttttaaataactatcgcttgcaccgccgcattcggataataagaatggtaatgaatgcatgtaccaacttaagaattgataatgtaaactacgactgaataaaacaccaattaaattattcatcatcattatcatagcaacataatagcatccatctggtccaatgataaaattgtttctattgattgtatttttgtaaaattttaaaataccgtctttaataattaaatcaattactgatttacctgtcatctttggagatacccatttattcaatgtgaatataataagtgtgaaaaacgtgtaatattaaaagagtcttttgaaatattggattgtggaaaacatcctcagataaaaatttccaattaatactccatttgtacatgaactctctgttaaaatcaaacgcattacgcaagaaactatctcttatctctttaccattaagtaaaaattgataattaataccaagcatcactaaaataccaaatgcaatcattgaaagaaatttaattaaattttcatcatttaagaaatataatataataaataatcctggtaaatataataaagcgttcattttaacacttaaaccaaaacaataacaatcaattgctaataatgctaaaagtttactgtgtaagttaaattcccatttttcattcttgtcatatttatcatcatatgatgattgtttatattttgacgctaattgaagtaataaaatagtacctaacataaaaaatgtagtaaaacaatcattgaataatcttaaaacataaattgaatgtaatctctttgatataactaataaataaaatacatatggtttaactttatgtttaccttcaatcataatataaattaaaaatgttaaaacaaatgtcataagatataataatctaaaagcttcctgtcctgaaactaaattattcattccatctgttaataatttcatccatgaataaatgaaaacatatccacctggatacactattggtcctgtatcacctttgatattatcataatttaactcaccacgttcaatttgggtaatttgttgcatatatgtactataatcaatttctgtatatggaaccttgataatgattaattctaataacattgcctcaaggaaagaacattaaaacaaacattggtgcaacaatggatgtatcaaataacattgaattgatcaattgaatgataaaatcatatcccttttgaatgaagtttctctcttcaatgaactgttctgcgggcttatcaactgtcgcctctttctctgacattgttaaatttatagtcagaaattagttacacacaagagaaaagaaaagaaacttcaacacgaacgagtttaccagaattaattacatgtgcaacgttgttatcacaattttcattttttcaatgtaacggtttttcaaaaaaaaattattacttttacaataatatacacaaaaagctataaaaatctgtatttttgtgataatagaatacattaaacagagttcttctcaataacactattagcaccttcattcccatcaaaacttttatctgaaacttcctcaaaatcatcagttaatccactaatatttcttgcaattttaatcttttcattaattacatcttcatctcttgtttcaatgaatctaatatctaaaatatttctaactttatccgtatcattaggaaataaattaactttaatcaaatcaattccaaaccctggtattaaagaagctaaaacaccaataaataaacatgcccaaaatgatggagtttgataacatcttacacctaattgataataattaagtgatgcagttgatgatgaccatgctgatgtccaaataaataacattgcatcagataaaaaagtttaatccaattgtaataggttcccatcttctttgctttaataaaatgtataaattacatgcaatgaattgcaatatgaataggagaatgtaccaactgaaaacattgtatcaatacttaatccattcctagttgcaactataccctgtctaaatattaaccatgggaaaatgaatgatattgcactttgatacataccatcaatcatatatttaacaaatcttaatgtatccttaactgtatgattttcaatattttgtctatataattgtggtatagttaatgaaatgtaatcaggtacatcttgatccattgtacctagtgtaataacaggaattgaagtgaaaaataaattgaaaagcatcaaaaatgtatattcatacaaataagtaccatcaaaatctgtgaaaataccataccaaaataatggcataacaaaaataacatttttataaaagaaacatggaatcattgttgataatctttgaaatgaccatttaccatgaactaaaattaatctttgtaaatattcaaattgtccaattgcataatctgatgacatggcagcttgtctaccttcctcacctgcaattccaataccaacatttgcagattgaatcattgaaacatcatttgcaccatcaccaattgctaatgtaataacatctaaattttttctaactaaacttacaatatctgccttttgtgatggtgaaactctacaacataaaactgaacagcattttttaccaagcatcaaaaacttcaattgaatctgtttaacgttttcattagaatcatcaaataataatgataatgttttaccatcaattaataatgcaaatttctcatcgggtatagaatggtctaattttgcatgtttgaaatgatttggatcatttggattatcaatttggaaaacattagttaaatatgagtctacagctttttcaatatcttcaattgaatcacattcaattcttaacagctccatattattatttaacattgaacatgaatatccaatacttattgcagtctcaactttatcacctgtaagaacccacagtttgataccagcttttcttaaactttcgattgtacttggaacattattttgtaatttatcatcaatagcagttgcaccaattaatttaacgtttctttctaatttatcagctaatacatccatttgaatttcacgctgctcatcaattaatttacttgcttttaaatattccaaattccattgattaaaatcattttcactaatttctttaaatgaaatacaaagtgttcttaaaccttcatttgaatattcatttatattgttcttgattgatacatcatgttcattaggaatgcatctatcaataatgatgttatcagcacctttcatatacattattattttaccatcaggagttttaacaacaattgacattctctttctagctgaagtgaaaggaataatgcataaaattttgtatctgatttctttaccattatcaaaaactaaatattcatcatcttctttacctaaataaacaatccccatatctcttgcaaatgaaactaaggaaacttcatcaggtgattcagcactataatttaaaacagtttcatcgtcaacatcttcaatatcttcatattcaataactgctgaatgacaaagtgctaaagataataagaaatcgtgtatctcattatttgaatagtcatctaaaaattccttagagacaaaagttaatttatcctttttaaagaatggatttataggtgataaataatcacacatcagttgaaattctttacttataagatctctaatataaagtatcttttcatggatattaacattacctaatcttctatcataaccttcctgtgcagaagtataagctaacccgtaagatttatcaccgattgcacattttttgaattccataatattctgtgttaatgtacctgttttgtcactgaaaatatattcaatttgacctaaatcatcagatatcccccaagattttggcatacaggggaaatccaacttttcataatacattttgacatctgaataaatgaaaaatgcatgaactgttttaataatttcaattgtgatatatagggaaattggaactaatgtttgatacatgattaaattaacaaaaaatgataatgtaccattagctgcaggagttggagcataaggtttgtattcaaagaatcttcttgaattaaactcttttctatagaataaaccattgattaaacctgaaacaaaacaaaggacaaataaaagcatgaaatttataatgacaaaataatttaaatcttttgaaattttagattttttagttggtgtagttcctgaattaagcataattttagtttctggaccagttgcaatagtaatacacagaacgtaatttgtatttcttagaactgaacctcttaataaaacattattgattgtaacggattcagaggtaactttttctagaccattgatatcttcatcatgaacaacaccatgaaatgaatataaatctttatttggtaattcagtttctaatgagaattttaattgggatatatctgataatttctgaatcttctttgacgagaactccattgcagttttagttttcaaattagtttcaccatcaagatttttagtctcaatataacaaatatttttctcattacttgatttcaaaagaatgcaatctgctggtatttcttcatttttacaaactcttattatatcaccaactaaaatacttttccacttgggttgttttaaattttaaaggataatttttagaatttgttgaattaaaagtgttaatacgacttacattatttgatctcaaagtgaaaagatctaaactttcattatcaatgatattaccattggcatcattaacgtttttattcttctttttgaaaatatttataaaacttctaaaagttttagttgatgattttttaaattttctccaaagtccgatattatcaataactgcattattattatctataccaaataatttatggacttttgaagaattcaattcataatcagagatagcacgtctataatcttcaaatgcatctttgaaggcagttagaacgacaataacgataagtgggacaggcttgcattccaggggactgaactccaaaaatttgaaaacaacctaaaataataatgaataagaaataagagttggcaatattagtgaattgaaagaatatattcattggtatgaaattcaatggagtatatttagttgttctaattttatttgtttgataaataattttattttcatttgtctttggatcaatgaattcattcggtaatgattgattcaagaatattttacgagaatctatctcctttgcatcattagcatgtcttttattataccatttttgaaatgtagagttgtataccctttgcaggaatgatctgacatcttcctctacagttttcatgatatttcgaaatgttttgatgaatgtggctgagactttgaatagattatattaatgatcacaatgattgataaataggtattaatgatagtacaaaaatgaaattgttgtacagtaaagtgatatgtacctaatacttgcccttgtaatataaaatagtgtacacttgcacacttgctgtctgttcaaagatgtaatcaaacaagaagcagttgcactcaggatacggcatgtcaaactgtaaaacaataaaaatttcattttcttctatcaaagagagcggttttgtttacataatgaaaattttatttttttacactatgtatgatagatgttatgacagtatatttgttgtggtgtttatagatttattatgttattattggttgtgttgtgggggttatcggatattgaatgtgatttataatgtctatgtagtgtgctgattatgtgaattgtaatatatggtaaaaaaatagaattaaaaatgtaaaaattgttaatttttcaagatatttttgtttaaagcatgtaaatttaaaaaattaattaccataatttactaactacttgctacaaaatgtgttctttatgacaatataactacatggatacaatctacagcatctaaccttctatagaacactaccaaatactcatataaccagttataaaacctgcaaacccaacatacaaagtaaaccatctcacacaatgcagcgtaacccttatatttcccaatgcggactcgacgttttccattttctcacacttggaggaagtcgttgaaaatttcacaatgaaagttaatagtgtgttggtgacgtctttctttcttgaattgtttcattaaacacacaaatttacatacaaaatgtctattgaagaaatcccagaaggttccgaagttaccattattccaaaggctgaaaagaaggctagagaagctttattaaaattaggtttaaagcaattaaaggatatttcaagagttacctttagaagaaagaataacactatcttagcaattgaaaaaccagaagtttacaagacttcaggtggttcttatattatctttggtgaagcacaagttgaagatttaactaagagatatcaagaagctatggcagctcaacaagctgcaagtgaagttaatgatgcaatcaatgctccaaagggtgatgatttagctgcttcaattcaagatgatttaaagaaagcttcacttgaagataaaccagaatctgctgatgctgatgatgatgaacctcaagatgctactggtcttgaagaatctgatattaccgttattatggaacaaactaatacttcaagaaacaaggctattaaagctcttaaggaacacgatggtgatatcgttaatgcaattatgtctctttcttagattagtttagattaattcttataaaatatagttaattaaaatagtttatatattataatttaataatcaataataataatcatttactattactttcatccttattctctttaatatcttctttgatattctccttattatcatcattgttttccatttcttcaactttttcatcattgttattcataaatccacatttaggacaaacatacttgatttctttagctgatttacctggagctgcaagtccattatgttgaaaacaattactacaaattaatgcatatcttttatcaggactcaattcattctctcctaataatgaggtcattaacatatcataaaatcctgtattgttgttactttgatgttttaaatcttcaattatcttatttttatcaccactttgaatcatttttaaatattctgctttcttttgttgaatttcatttgcttctttctccaattgttttaaatcttcaccatcagaaaatctagctaacagatccttagttttgttaaaattggttttctcctttagtgtagatagtttctcactatgttgttcttttaaatactcaatataactttccttgttattgattaaataattgtaaaatgttaaaaatgaataataaattaatccaaatataaagggtattaatatcaaataaaacatattcattgattcgaatattttacccatcttatagagataactaaaatatatcacatacccagaagtaaggtatataggaattaacctcccatagtatttcttttgtgattttaaatttcttaattttttttcattactggttattttgaaagttattttcattaactcattttcaaattgtgttggatcaaatgctttagatttaaataagaacattggcgtattcactaatgtggaagaattgaacaaaaaaaaagatcaaggagtcaaggctttggcattaaagttaaaggttaattatgatagaaaaaaattatcacacttaagcgctctaagatctgtttgacataattatacgttactgatagatcaaatctgctagattcaccccagtttaattaatctattcatttaaatttaatatttttatacaagttctaaacaataattcaataatatactctatttcattaatttatctcttttttccaattcattaaataacattttttaaactttcgattatttcagttttctttatttgagtttcttcaaatgttttaatatgttcatttaatctattacctagaaatattgttgtattatcaatatataatcttaattgttcaatataccaatctttaaattcagttattattgatattattttcttatgtgatgtgtttaatgtaacagctaatgttaatgcagtaaatgcaaatgcactatttagtgtaatcaaatcataaatatatccaatgttggaaagaataaaaatagtgaatggtgcagcaattatttcattaatgatatatttatttatcttggattggacttcaggtaatttttcgttagctattttaccttgtaagttagataaatagtcgttaacattttccttggtttgttccttaatttgaatagattctgggaataatgtatctattctaccttctaaataatgtgatttggaacttgcttcatttaatgtaccataacattcaatttctccaccaaataggctggtctttaccttagctcttgtaccatttaataaattcgatataaccaatgtcaaatcacccgaattataaattaattgtgttatcttagtaaaatctttaagtagtacattctctagaaatggtgtaactttactttgtaattcaaaatgtgcatgctgtgaccattccataatttcatcctttaattgaactgcagttttaatgtccgatgatgaatctaaatgtagttcctttagtaatccacgaagtaataaaattaatggtttatatcccgatgtttctctattaattgtaaataataattcattaatattagatttttgataaagtttcaaatattcactaacgttatttatatcattcataatcattgaatttgctgaatttatcttatctaaatcaacttcaaatgaatcttcaggtaatgattcctttatagatgtacctatatctaatgatgaatcttcaattttggtatttataatatttaaatatggtatatcattgatttttgttactttaccatcacttgataaaatattcacccataattgaatatcactttctttaatttgattatcctttggattggaatttaaatcaagtgtttcagccccttcaagtttaatatgttgactgaaagttgaatcatttacttccacaaatgataaattattaaaaaaatcacgattcagtaatttactagttccatcaccaagtttagcatcttgaattaatcttgtttcactattgaaaattggtgatttacatttaaatatcccacctccaatagattcattcttattattatcaaatataactttcagattggaattaggatgtgatttacgatatgagcgtagtatatcgggatatgtatgatcattagataatggatcagcagttaatgcatcgacaaataatccaggttttaattcttttgattgattgatacctaatgtaatagtattcggttcaaatgtatcagtatctaggtttggtatgataggttttatagtgtcaattcttttagttattgttgaattttctttaaaatataatttacaatcattaagaagatcatttattgaagtgttattggttgttgaattgaatcgttttaattgatggatgtttgaatttttcaataaagttcttgagtatctagtactcattaatctctgcattgatgtgattaagtggttatctgatctgatatatcacttttgtaaaaacaattccattaactaagagaattttgaccataattaaaaattactactactaaatgtacattgcgagaggaatttgtgagaacactgacacaggttcgaatactgaatacagagtttagtagataagatgtttgttagttactaactatttacctatgcaaggttagtttgcaagattcacaaaactattttctttatgtttcgaattttctatccaatataatctagcaataatttacttagttaacccctcttcaagtttactcaatatatcatggacttaggtatacagtgaaaaacggatgattatcaaatcagatcatttagtaatgccttataccaaaagaggggaacggttaccatacaccaatagatacacgtacattgaagtgatttagagaaatcactagataatcaagaagaaacatcatcgatcccaaccccaacgggagatcaaccaccgatctcccctgaaaaattattatataagcgaagatttcaacttctgttgatgtcaaattaatttgaatcaacatgtcaatttgatttaatttacttgatctttagacaagaaacatattattaatatgaatgtacaagtactgaaaagacaattttcatttgcaagagtactaagaagtcaccaaaatccacttgtaagtatgaaagagtgattactattgtttaattacacgattaaacaaacttattgaaaataaatgaaaaaaaatacaatactaacatgaattctgattattaccaatagggtttaccaaaatttaaaactccaaacacaaaacttccagtgaaacattccttaccaaatgtacgcaagattttattagtatcttcaggtaaaggtggtgttggtaaatcaacagtttcaacaaatttagcaattgcacttcgaaattcagatttaaatgtagggttattagatgctgatatttttggtccaagtatacctaaactaatgaatcttaagggggaaccaagaatatctgatactggtaaattgattccaatgagaaattatggtattcaaacaatgtcaatgggttatttaattccaaatgaaaatagtcctattgtatggagaggattaattctccaaaaagctttacaacaattactttttgatgttcaatgggataatttagatgttttagtaattgatttaccaccaggaactggtgatgttcaattaacattaagtcaacttattaaaagttgatggtgcagtaattgtttcaacgagtcaagatcttgcccttttagatgttaaaaagggtatctctatgtttcaaaaagttgatattccaatacttggacttgtggagaatatgtcagtatttatatgtccaaattgtaaccatcaagaacatttatttggtaaagaaggtgctctattagaagctgaaaaattagatattacacatttaacatcagttccactcaatcgtgaaatctgtaaacgtagtgatgaaggattcccaattgcgttggataaaggatccaagatggcagccccttactacgagatggctaagaagttgaaaaacagtctagaattgtgagattaatattaggaaatgaataattacccgattgggaaggaggaataaaattttggagagcaaagttagcaaaaaggggagcagatttcatttacatagctgatcagtggaaatagggttctattccacttgttgccctttatctgatacttcatttatgttgttactctgtgttattgactcttctttactgcttgtttctctttcctgtttgttcttctagaatcacccacatttgctctagcttcgtgtgttctattaaaaaaaacattaatttatctttgctgtacatttatttaactgtaactgcaataaaaaacattcacattaactacaaaacaaaataaaaaaaattatttaataatgaagttatctatgaaccttttaatctcttgtcttttagctcctgcttttgcacaatcattacctatattctgattttgattctagtcttgactcaaatcaaattcactctaatcatgttgccgctcatggtatctttagatctattttgagtaatagagattttggtgctccagttgttatatttagtgaatggctttcaccaaatggtgaaatttatgttgttccttcaacaaatgatgatactgaatctgaccaaatgcctgctatgggtttaggttataaatttgttaataatgataattcaattgttcaatcattggatatttctaatgttgctgaaattaaggaagaaaatattttagctcaaggtttccctttcggttggaagaaacatgaaaaggaaactgctgaagattttttcccttttggttctaaaaagtttatgatgatcggtcttaataaaagctcatttgattcaagtgctgatgctattgaaaatactgatgatcattataacatgggaagtgaagatttatattatattaaagaatataatggttatgtaagtaactccggattacttaaatggtttaaggaagatgaagaagatgatgattgtaatgctgatggtagaacaaataaattatttgatactgatcatttcttatttgttggcgttggtagtattgatacggaacttccacaagatgcttactctgatattgtttacaaaagggacacagaatcaatcaaagtaattacttattatactactacaactgttacatcaactcatggtgttacaattactcatactgatcatcctgaaccaacaaatcattataaggaacatgttgaaccaactgagttaccatcaacaactgattttgacaccacacttcaaacaacaacacacgttccttttattttctccacttcaaaggatgatgagattttagaagagacaccaactccaactgttacagaacctgttcctgatgttacttatacggaaaccttaactgaaacagaaaagacaccatgtgaatcttctactacaacatatgaacatcctgttccacctcctgaaactacatcagttccagaaactgagtatgaaactacagaggcatcatctagtgaaataattgaaactacaacatcagactggacagttccagaaacttggaactcctatccatttacaacaactgaaactaattttggaccagtttattcatcacacccaatttacatgaatactactactactgctgatatttcaacaatagactcaacaacttattcaacctttaatcaattccatacttcattatatggtaatgatacagataaggttaacaatggtactaagccatcagaaggatcaatttttactagaaccagaatgagtaatatgactactaatgttaccacatccgaaaatgctggtaatggcgaacatgcttacttaggctctttatgtggtttgatctttgtttttgtttctggtatcatcttgatctagtggaaaaattaattaggttgaacattgtcttgtatttttatttgtatttatactagtttttcgaatttttttgtagtttttatcagctttagttttaattattcatagtttacacaaaatcaatataatacacacctagtgatttataatcattcttgtaatgcatttagtctttgtctcatatttaggatcaaatcatcatcatcatcttcctcttcaatttcttgacctgaaggttgttcagcttcaacttgagtatcattcttaacattatcaacttcagaggcatttttagttttatcacctagtatatctgttaataatgtatcgatttcttcattttcatctaaatcttcatcttcccaagccatatcatctaatgcatcatcaaccatttcatcaattataccagatttcattaattctttagataattcttgaacagttttactcatttgaggtaatctaaccaattgattcatatcttgcattataccagttgatttttgtaatgaaccctttaatttaattaactgttgttgctcatttaatttaaattctattgaatctaaagttgctctagaaatatgcattctttcattaactttttgagtatttcgtaattcttttgcatataatcttgcagatttcatatcattcttctttactgcttgctttattaatgatttactctttttttcaacattatttaaatcttgtatttgtctatcaacttgtctcttgttttttcgtaatgtttgctgacatttacgatattgttcctttggatcaggtccccagattgctttctttacaaaatccatatttctgtaatttattgttgtttctaccctatttcaaaccttacttttgagtttaaacgttatgtattaatccacaatactacgttataaattcttatcaatgtgacattaagtaatttaaatttatcctgttcaatctgaagccaaagataccataataagacgacccatcgacgcaaatagagccaactaaaaacttcaagttttcattgcattgcaacgcgtcaaattcaattttttaaaaatttgcttttaaggacgcgtgatgtttcaccgtattataatggaagttgaagtggaattcaattagtgaattttaatgtacttcatctttccttttctttcctgatattttttatttttacttaaacaatcaaacacatacacatacatatatcacacaatgttagaaggtaaatttgaccaagcttcattattaaaaaaagtatgtattaaagtttatttcaatgtttttcgtatagtttctattttccagtaatttgaacaagaaatactaacatgacatcacaaaatttacttatattatagattattgactctattaaggactcagttaaactttgtaactttaactgtactgaagcagatggtatcacagttcaagctattgacgattccagagttcttttaattgcattgaagatggatccaggttgtttccaagaattcagatgtgatagagatttagtcttaggtttagatttagaatctttaggtaaaatcttaaagcaaggtaataatgaagattacttaactttaattgcagaagatagtccagattctttacttgttgtttttgaagataaaaagaaagatagaatttcagaattttctcttaaattaatggatatcgattccgatgttttaactattgatgatatggataatgattgttcattgactatgccatcctctgaatttgctaaaattgctagggatttcaaaactatgagtgaatctttacaaatcgtagtgacaaaggaatctgttaaatttaaggctgaaggtcaaattggttcaggtaatgttatctttaaaccacatactgatcttgactaatccagaagaaagtattaaaattgatgttaatagcccggttaatttaactttcggtgctaaatatttaaacgatatcgtcaaggctgcatctttatcatcaactattcacaatgaaattaacagacaaagcacctgcattatttgaatttaaattaccaagtgggtatttaagatactacttagctccaaagtttgaagatgaagaatagtcgtcgcaaattcatagatcatagaataataatatgtaccaccctttgtaaagtatttaatttaagaaaaaccggaaaaaaaaataaattaacgatacatccactgataaaataatattattgatttctataaaggatattatttccaaatacttacttctaatatacagcttctttaggattctcaagctgaggatagctgagatgagcatatcgttgagttttcagttattggtaaaactaatctatatgcatcatgcctattcatataatatctgaataaacgtttaattctgataaacccaaaattttcatataatcttaaagcttttgaattcatcacttcagtttctagagatatttcatcacactcatatttttcaatcattaaattaatggccttttcaataagtgttttagcaataccaagccccctatattcatcatcaactgataacattccaatatatcctctcacacgagcatttctatgtggctcaactttacagattatattaccaacaagtttgtctttatgatgcgccaatagagttaattctggccaattatttatgaaaaatcgataaacaaaaattgagtatggttcactcaaatgatggttggtcatagcttccacatctgctatttcctgatctatgacctctctgcttcttagagatgtatccaatgagacacttctgaattctatatcatcaacagtcaccattaccaacaaaagaagttctgaatcaaaattatatcggtactccagttgatttgaattgtgacttgtcacaataaaaagacttccaaacattctcacatcttcaaaaaatttaattgcgtcggctcagtaccttttctctaattttatgtaagacttcttagtttatcaggtggcaaagggacttgattttgattttgttaatatctacttataatatcaatttctaacccaggaacctaaaacaaatacaatgacagattcttttcaccagatgggtaaagggattctgccacacaacatggtttctacctttttaaagggctcaactgtgtttgattcaaaatttgaacagaaacccgataagaatatgataactgtatacaatgcattcaatggattacaattgagtgtaccgtacgacttttgcaataatctggaaggtttgaaaaaatatattgcagaactgtttcatattgatcctgaatggttatttctgttaacaccattcggtataaaacttaaatactctatgataacgaatcaacaagttacagaattgtatgcctttgatagaaagtttttcaatccaggactgttaaataaagacagagaggataaaattttgaaggatttgataaactcattagataatgaagatctgatttccatggtgaaacctagagattcacctataggtaacacatcaaccgaaattaacaaattcatagattccttcttagaaccaaataataaacatataagttccattgatttagatttcgataagttaagaatgtgtttgaagttcacttaaaaggaactccggctggacttcctgctttactatctgatatgaaaagtacatttgcaaataatttataccaccagaactacttgattattgaacatataatagaatcaattaatatattggtccaatatataaccaatatgaaaaatgatataacctaaggaaatgaacacaatattcgatatatttaaaaaattgagcagtgagtctttagttagtaaatgggaagacgcctttcaattgcttcagaaagttaccatatcatatgttaaccaaaccaaccagaggacgatgcagttgactctatcaaacctaatgaactttaacaaacttgaaaaatctgcagctaagtccaaagtattgacgaaaaagataagctcatttcttgaagaacttaatactataatacaagatcacatcgatgaggaaattagaggcatcattgatacctatcaaaactttgcaaactcttatttaaaaccagaatgggaattgagtgaaagtggtaatattaaacgggccaatcaactatatgaaacactagaatcgattataggtgatatgtccaatgaaatgaacaatataccatcttttgaacaaatgataattacaactgacgaaatgtcctacaaatttatctgatggttccataaatagaatactacaactgattgaaatttatcaacgccaacaactagaatatgttcctaagattacaaagattgcaaatgatctatatgatatacaaagtaagtattatactatgcgtcaagaattacaaacgaatataataaagggtccattgattagtgttgtgaatgtacaattaatggtacgtgaagcttcaaatttgattaacaatgaaatcttaataaatattgaaaatatgcaagaagaagaactgattttatcaagtgttgtggatttaccattgaattttggaatctggatggtttctgtaatacacaacaaagagtatggaaaatcaattgatgaaataattttacaaactagccgaatattagaaaatttaaagtctactgaaagtgctagtagaagtaaatggattgaagaatttatcaaaggatagagagattgggaaatttgaacttaattatttaactgatttagagaaaaagaagtttgttaattatggactttttgagtatcaaattaacagggcaagtgaaaataagtccaataaccgtgttagttacttaacaccaataaataaatttctccaaaatatgaaaggaaaagaggatgggtttggagggatcaatgatatcacaagttataacggtcgtgaattgaatgatccaattactgatgttaaaactcaattttttataagattcatccaagatataaatattgatactgcgctatcttacataaatcaactaaaaagacaaggctataattcagaaagtatttcacaattgaatgatttaattgttgatgataataccgcatctgagtattataataaaaatctttttaaatttttaaaaggttacgagactaaagatatcaaggtggtgaaaaataaagaaatgaaaaatgaagtagctgaaagtgaaaagataaaagcatatcaacttcggatacaaaggttagaaaaacagttgcacgagaagaagtttaataaatttcagtataaatggtctgaattgagaactgatgattacacaacagaagaaattgaaaattatgcaaaccaagaaaaatataccaataaaaatgtcaaattaccgcctagtcattatctagagaaaatgaaaagacttgaagaagaaaatgtagctcatgttcagaagataggagagttagaaaagctgaaagatattgaaggaaatgataatataagaagaatattagaaacaaaaaacaaagaaattgacaaactaaagactgatgcaaaggttaaaaatgaaagtattgaaatgctgaaaattgagattgaaaacattaattcacaaaatgcaaaacttattgaagaaaagaaagccggggagcttaagcttagaaaacttggagaagtttaataaagaattacttgaaaacatggcaaacaaagaaggtgaaataatgattgaaaatcaaatgaatccaaaagaagaagaatgatttggaaatgagaatagaggagttggttgaagtaaatagccaatatgaaaagattgtctataaaattgaagatattgaaaagatcattaaagatgtgttcattattttgaggaacttcattggtaaactgaatagtatgagtaaaatcctatatgaagacatgaataacttttgtttgatccttgaaatgatgggattattacttgtgcaaaatgaatctggtaattatgaaattcaaagagttcaaaggtttaagaggaagtaaaaggaagataattggtgctgatgatgataatgataaagaaaacgtcatggatgatgaaaaattgtttattcaagttattgcgaactgatatagttaataaatgtaatgttgaatggattgaaaaggaaaattaatgatgggaaatggtctgttgacaagaagattaatcttgaacaggttactgaaaatataggtgatttaaaatatgtcaaacttgatgatattgatgatagtattgaaagtattgatttgtttaataaccaaatccgaagtatcgttgaacaatatgatagtcataaaactgacgaaaattacagaacttttattgattctattcaaaatagaaccagaaatgatgttagtaagtattcataagagattcgaagatgttgaatcattagctagaaaactacaacgtgaaaaggtacaattgaaaaacgaagttaagagacttaccaaaaagaactctcaacaattagttatcaataatttgaaaagggtgatttagtattgtttttacggacttcaattggtacagattcaaatatcggaggtgaacaaccatgggctattttcaatatgggatcacctaattattatcttcgaaatggtaacgataagttaaagaaaaggaatggtttgttggtaggattttacataaggaacgccgggtggctggtgaagatgagaatccattcaatttgaattccggagtggtgtggtattgggtggatgttgaagagtaagtgaatcgattgtattcaatcacgataactctaggccaagtcaatgtattttggtgttacatgtatccatgcggaggaacggagtcaagaaagccagaccgtgacttctccactataatttttattccttatctttttgcatgtgtaactctgtaagttaatgtttatacctactgttgtgctattctttatgcaatggacgttataagtcatacagaggaagaaatcgaagaagacaacgatttccagaagtgtgtttcagcctatttgtatggtgatgaacaatttaatgatgaatatcataatcagttttgtgtacagtttacggacatcgcagatcaactatttgcattgaaactagacacatatcagtgtgaagtgcaaaaatacacagtgaagaaaggtataaatgttccagatatggtagatttactatgtgttcttcacttactttgtttacagggaccatcatcaactatagaactgggtaacaactgtttccagttagaggttttacggacaattattagcgaatccgattggctggaaatggcacttattgtcaaatgcggccttcttagaagaggaggctcagtagtttacttatcaccaatgtttagatattatggtgatctttatcccctggatctctcaaagacaacaaaaataacatgaaagctcttgcacatattagtaatattgatattgatattccattatacgcaaatagagtggttgcatttggaagaggtgatggtggaaatctaaaaaatggaaaacatttaccaagagtacaaagaattgttatagatgatatgcgtctatctgcaacacatttttatatatggatagtacaatttgattctacactagatggtgtttgttatatacaagatgtttcaaaaaatggtacctatgttaatggtgataaagttggtaatggtagatacactattttacgtcatggtgattgtatttcaattggtgacacagttttcgaatttgaacttgttggaggtgtgaagaaaaccgaagtatgcaagagagtcggtcattggagtattttagatgatattattggtattggcacatttggacaagtaagtattacaattaaaaatgttttttaatgttcagttgctgagcctccaaaagaattttttttactaacatcaatctatcttgattatttttacaggttcaaattgcaataaataacaaagataaggggtattatgcagttaaacgtatcaaaaaaagcacaaataaaggagttgatgctgaatattcattattacgtcgtttaaaacatgaaaatattgtgaaggtaactgatgatacggcaattgaaaattgtatatttcaagaattagcaattggtggtgatcttttctcatatttatcacaagagggatgcgacgaaggatcaacattacatggattacctgaaccggaagcaatttttgcacttttccaaatatgtcaaggattattatatcttcataaaaatggtattgttcatcgtgatttaaaattagataatatttttgttatgggggctccaataagttatccacgtttagcgattggagattttggtattgcaagagatattaaagaatgtcatggtagaatgaaaacaatggttggaacagctgaatatgcagcacctgaaattctattacctagagaaaatagtaaattagaagataataatttcccaacttcaataacttccattacagccaaaacatacacatctaaggtagatgtttggtcagttggtgtaattgcacatattttattcactggtatttcaccattctatggatcaacactcgatgaaatgcgggatcgaactgagagaggtgttggaagtttaactaattgggcaactgatacatcaccaacgggtcaagaatttgttaaagagaccttagctgttgatgccaataagagaccaagtgttgagcagatggtccatcataaagtttttgataatggtggaagatcagttatcatggcacggatcaaacggaaagtttagctccaccagactgtacggaaacgccaagttttgcgttgtttttcttcttctttaaagttctatatggatcatcttgatattttttatattatcccgcactctataatattataaaactttgctactactactactactactactatatctactgatatacaatgcaactaccggtaaatatatcccaccctaacgtactcatcgcccagggttaaagtaatccaaagcaaaatcccacagttaatagtaagaccgccatacacgtaaaaaaaaagatcggaaagtccggttgttggttccactgcaaaaattatatttaaatcctcgctccttgccttcacacatttaagcgggttggataggctttctttcatgaattaaatcctcgttcagttccgtgtctgctatagagtacatctctcttttcttttctcttccttgcataacactttgacttgttttgattatcaacaagttatttgagagaaggccacctatttcactctcacatataccatttttgtttacttggttttaacttatactaataccattcattttgcttttctagtttgtttttttgcttacgctacttctacacaaatttacatcaccttatacaaaaagagtcccactttttaacgtgttttagtttttgagttttttctacaattttaataattaatagctgatacatttacatcagccgactattgtttataccttaaaaggaatcaaaaactacatccttttcttatatctctgaatcatccatcaaccggatcgcttacaattcttgtgacgtgaaaaaaaaattcaaaaacttaaaatccgaacctgtcaatttataagcgaaattttcatattccgatcacaattttttttcagatcaaatactacaattactaaaagctcgtatttcaagataatttatcaaatattcatattatataatatcatttcaacactcatataaaaaaatgaatactaccagttcatttgaatctacaacatccttaaatggtcaaatcccacaattatggatgggggagttagatcaaagatgggatgagttaactatcaaacaaatatggaataatcttttaaatccgctcggtatagttattcattcaattaagcttattaaagataaacaaagtactattctaggtttagcaaatgctggttattgctttattagattccataactttgatgatgctactaaagttctgaataccttcaatggcaaagttattcctaatactaataacttacattattttagattaaattggtcatcagctaatattcaagcagctgccaattccattgtttcaaatactaccattccaaccaccaaccaacctttggaatattccatctttgtaggtgatctgcctcaaaatattaatgaaaatatccttttacaaactttcaaatcaaaatatccttcatgtacaaatgttaaaataatgattgatcaaacaactggtaatattaaaggttatgggtttgtaaaattcctcaatgaagaagaacaacaaagagctttggttgaaatgcaaggttatgttttacttggtagagcaatcagagtttcaactgcgtcaaaatccaacaatactaataataatactgttactaataatagcaacaatagtatatctaatgctattagttcaccaccacgttcaatctctccagctgtatcattaccattatcaacagaatcatcatcagttaaccttaacctaactcaaccattaccacaaagtactccattacaatatttcaatgatccatcaaatacaactgttttcattggtggtttaaatattccatttactgaaaagcaaatgtttgatttattttctaaatttggtagtattagttatgttaaaataccacaaggtaaaaactgtggatttgttcagtattttttaagacaaagtgctgaaatggcaattattgaaatgcaaggttatgatattgggggcggttgtaaaataagagttagttggggtgcaaaagctgctcaaagaagttggtttgctagacaattacaaatgcaacaacttgaagatcaacaatcaaatcaatttaacccacaagctcaagttcaagtacaatcacatgctcaagctcaagttcaagctcaacaagcagcacaattacaagcacaggcacaagctcaagcacaggttcaattacaagcacaacttcaagcccaattacaatctcaacttcaattacaacaacaacaacaacatcaatcattgttaggattagatttttcaaatagtgatattaatacactgctcaatatgtctaaaaatcaaagtatgagtaataatttaggtctttatgattcatttgataatagtggtattattaataataataacaaaaactatagtactaccacaggatttcaaaatgatttaattccatttaattcaatgaatatgggtatgaataattatccaaatgatgaattaaaattgaactaaattattaattgcagctcgtgatggtaatctagatcaattagaacttggctcaaacttatacaattaaatttatttatgctgttaattatttcacacacaaacatattttaaaataatattaacttattctttattgtttttttcacctttcagttatttttttgcacatacaaatatacacatacaacacatacattacatgattttttacattccatttcacattttgtcatttgttatttttgctctttatactatacatttattatgctattttaccaaaattttatgattatgatgcatttatcaatttaatatacttttttgaaataatttcaaatttgttttattttatcctttatcttaatttaatttattttttcatctttccatttccatttccatttctatttcttcacattctctattcatctagctttttaatttatttatttattataaactaaactaaactttaaacatatataatttaataaactgttatccacggtgctaaaatcgacgcaatcgaccctaacaatgccgattgcctagtttctcacttaacagaatattgataacatgaaaaaaaaagaaaaaagagggttctccgttaccgcaccttaaacgggccgaagaggctaatgcccataaaaatgacactattgccctctattttgacacattgccgtttgcgatgtgacgtaaaaaaattttttattggtggcttggcagtttagtcacattaaaattgaactagctgtgatggaaaattttactaagtcattgggcattaactgcattttatatggcatttactatattttaagtattatcaacggaaggattcatggctttgttctctatatctggacaaatggacctaaatcatcctttgcgggggatgcgatagtgttaagaatgtaatgacacatcagtgtaagatatgtaagtttattaaagtttattataaaagtatcaagctatccgtgtgactttcataaatgctgattttctgctctgggacgggaacttatctttcgttttctttctgtttaatatttcttcttttaataatattttacttccttatcatttattaaaaaataatttactacaaaacaataaaaatgaagtcagaagtacagccatcaacaagtggtgactatgaattaagtactacattaccaatgatatcaactgaaataaatgactcaaaaacaaaaccaactataagttatgaagatagtatagttgatagtaaagaagattacaatataaacaacccaaatccagctgaaactaataacaatagaggtttctttggtaattttatagattcatttaaaccaattgaacttgatgaacttgatgaaaacttaactgatttggaaagagcaaatatacttgcttcaagagctccattacaaagaagtttaaaaaatagacacatccaaatgattgctattggaagtgcaattggtacaggtttattcgttggttctggtaccgctttacatgacggtggtccggccagtttggttatttgttattcattaattggtactatgattttctgtactgttcaagcattaggtgaattaggctgttgcattccctgttgcaggttctttcctttctctgaactcaagatttattgcaccatggtggggttttgtgatagcatataattatgcattacaatgggttattgttatgccattagaattagttgcaactgctctaacaataaattattgggatgataaaattaattcagctgcttgggtttcgatattttatttcttgattgttttcattaatattttcggtgttaaaggttatggtgaagcagaatttatattctctcttatcaaagttttagcagttattggttttattattttaggtattattcttaattgtggtggtggaccagtcggtggatatattggaggtagatactggcatgatccaggtgctttcaatcatggttttaaaggtttatgtggtgttttcgttacagcagcattttcattctcaggtactgaattaattggtttaacatcagcagaaactgaaaacccaagaaagacattaccatctgcaactaaacaagttttctggagaattacattattttatttaatttcattaattttagttggtttattagttccatataatgatccaagattattaggtagtggatcatcagatgctgcagcatcaccatttgttattgcaattagaaatgcaggtatttcaggtttaccatcagttatgaatgcagttattttaattgcagttttatcagttgcaaattcagcagtttttgcatgttcaagaactattgcatcattagcagatcaaggttatgcaccaaaaatttgtggttatattgatagaagaggtagaccaatggttggaattgcgatttcatttttagttggtttattatgttatttagcagcatcaccaaaacatggagttgcatttgcatggatgatggcaatttcaggtttatcatcaattttcacttggggttcaatttgttttgcacatgttagattcagattagcattagcaaagcaaggtagaaatactgatgaattaacattcaaatcaatgtcaggtatttatggatcaatttggggtgcatcattaaatttcttaattttaattgcacaattttgggtttcattattcccaactaataaagcagatgcatataatttttttcaaaattatcttaatgcagttgttttagttttttttgcattttgtttcttcgtttggaaaaaatttaaaatccaattattaattccattagaagatatggatttagatactggacgtcgtgttgaagattgggatttattaaagcaagaaattgcagaagagaaagcatatattgcatctcgtccattctattaccgtgtttacaaggcatggtgttagatttactattagttatatatatggtacagtatattttgtgtaatctacttaaatatgaaatgaaaaaaaaggtttattgatatattaataaaagaaaggtcaaaatcatgtaacggaaatagagagcgtctttccgacagtgtaaaatttagaagttgaaaatttaaagagaccggggccgaatcgcgaatttgcagagagtaatcacataaggaagacttcctattagacagttttatttggtatatttactactaactggtagggtgtatactctacttctttatcaatcaatcaatcaatctactatgcttgcacgtaacacattctcacgtctaggtcttggtctcggtgtcagatcaccaatcgcttctttcagtagatccattttcactgttaaggcaactccagctgaagaaaattcaatccttgttgctcaaagaaagaatagaccagtttctccacatttacaaatctacgaaatgcaacttacagctgttttttcagctcttcatagaattacaggtgttggtcttgctgttggtttctatgctgttactgtttcatatgctgcaggtatagttgattctgcatctcttctttcattatattcatcaattccagttgctggtcaatatgctcttaaggcacttgcatcattcccatttgcatttcatgcttggaatggtgttagacatttaatctgggatgctggtcatgaagctaacattaaaggtgtttacagaaccggttatgccgttcttggtttaactatagtctctgctttagcacttttatttgccttaattttgttgaaaattaattgatcatcattatcattatttattactattacctattactgattaagtatttgatttataaattatagttagtactactatctctcaatatcattattatctattcgtaaattgcactatacaaacattataattgttgaagtaattttttcaaacaattacgtaacaaatgttataaattgcgtttaagtcatcgtgataataaagggtgcaagtcatggatggaataccacacatcccttcttcttcttgttgaataatgggatttctaggtaagaagtggaacgaattggtgtacacactaacatcgaatgatagatacgctggttatcatacctctaaagcacttaaatctttagatgattcgaataatattcctaaaaaacatgagataagtcaattataatgataataataatgatgatgaagataataaatatgctggacgatgatgatgatgatgatatcgatgatattgaattagagaaaaactttaaaaaaaatcatactgttgaagaacgtcaacaagctcaattagttttagattcttggcatataattgaagatgttattaatgtagatttaccaaatttccaaatatcaaatgatgctgatataatagatgatatacccgatgcaagtgattttattaactcattatcaagtccttgtactcctaaagatttaaacgttgctcaaaaacatttaggtgttcaattaccttatcctgttatacaatcatttttaattcatgatggtcaagagatacccccttccatgtcaactaaattaggtatattttatggtttacaattattatcattagaggaagttattataatgacaagattatggaggaaagttgcaactagagaatcgaatgctaaaagtcataaacaaaatcaacaatcgatatcttcaattaaagaaatcaatgaagataaaaatgaagcaattgtttcaaatgatccaaatattcaatttgctaataaagttgatcaattatcacaaaataatttaaataattatccagatttaatgcgtaatgtctctacacattctaaaaattattatagagcaaagttaccgattcaaaaatcatttccaaaaggtcatattaaatgtcaatatgcaaatcctaattggattcctttagttactgataatgcaggtaatcatattgcaattgatatggatcctgatattgatggttcaaaaggtcaagttataatttttggtagagattttgatacgaaatatgttattgcaccaaattgggctcaattcttagtatcatttacaaaggatttccaaattgctgaaaaatgtaatcttgattatgatccaacaactggacaattcgatttagcttatgttgataaaaatggtaatacagtcgatcaaggttatttatacgttttatcccagagggtacaaggtaatgaaatataatataatatgggaaaactttagaaaatataaaacaaaaactactatataagcttaacaatttattaataagtaataaactctaattaaatctaatttactctgaaaaatcttcatcactatctaatgaatatgattttgctggagttgaacgacgtgatgtggtacgtgcactagttgttcttttctttggaattacttcttcatcacttgaaagtgcaaaatcttcagatccatcatcttcatcatctagtatctcaaaatcgtcttcttcttcatcttcacttgataaaactttctttggcgcctttttggttgctgctcttttaactgttggtgttttcttagctactggttccttcttaacaacttctggcttttcactaggtgattttcttactgcctttttaactccatcagatttcttatctttacttgctgtgaaattactgaataagtgaatcaaaatcatttaattcttcaatttttggtggactttttgatttagctttcttagcaggtggttcatcatcttttttctccttctttacttccttctttacttccttcttaacggtttctttctttttagcaggtgccttacgctttcttttattattgttacttccattattactactaacagtttgacgattttctgcatccttagctaaaaagatttcccattcagctaaaaattcttctaaatcttccatccaaagatcttttggtgatttttgtaataatgtattaagtaatgcttccttttcacctttaacttttaataaactttcgtatctttcctttgttaaggaccaaattggcataccaagtaaatagtcatataacattgagctattttgtttatgaaccacaactaatccggtatctacctcatcagcctgcatttgttgctgtaacattggaaacagcagcttcaacatcgtcttcgacagatccttcttcatcttcatcctcttccttaatagctgtagatttcattggaattaattcattctttttatcaaaacctgggaaatctaattccttcaattcgtcaatcaatattttcttctttttgttaccaacaattaattcaccatcaattatcattttaacaaatttagcttgtgctgaaatcttctcaacttgattagaatattcctttaccatataattttttcttttttgataaaattctaatctaacatagtaataatcttgaataatatcattaacattagaatatttcttaatttttccacttggatcaaatgcaaccatattagaactacttatagttgaaattaacttgaatctttctaataatcctactctacgtgttttttccatttcatcatcagataatttaataataaatttaacaccaacaccgtgatcttcttccatatctttaatccatgctttttgtttatcactaccaccaagaccattcaacaaaaattctttcattgtaattgtccacattctagcaggtaattcactaatgactaatgtattatcatcaatttcttcaattttaccttctaatctccatctatccttactaggttctcttgtaataataccttcccatcctttaaaccatggtgttaattcattcatttctttaccattcattaataatcttaaattttcaacaatatcagcaggattaaatggtggtatactagtactccaacctgaaccaataccttcacatccattaactaataacataggaatgactggtgcataccattcaggttcaactgtttgttcatcatcttgtaaatatttcaacaatgggttatctaataaactaaaaactttcttggtaattggttgtaattcagtgaaaatatatcttgcagctgctgcatctttaccacctgaagctcttgaaccaaaaccaccatgtggtattaaaatatttaaattatttgatccaacataatcttgtgctaaaccaataattgattgcattaatgaagcatcaccatgatgataacctgtatgttctgaaatataaccttctaattgagaaactttgatttcatctcttaaattacgtttataacatgcataaagaatttttctttgaactggtttgaaaccatccataattgaaggaattgatctaacattatctgccatagagaataaaattaattctttattaataaattctgtaattggaatttgtgataattcaggatctaaatatgtaccaacttgataatttcttaaccattctttacgatcatctgctttctttttagagaatgctaaatcgatactcattttatcttcatctcttaatgcatcaaaatgtttcaaatgtttatctaattgaccgaaatactctctcatttcctgtgctgaggaagtacccaaacccttatagtacttttgcttataagaacatgtcataccttcagtttctctccattgttcatattcaggcattgaatagaatgcaattgattttctacgatttggaccactcattatagtaattttgaacaattggagtaatgaattcaattaagaaatttggaatttctaacaaaccagggaaggaagtttctaagaaattaataattaaacctttaatatgagaaccagtcatgatcttgatcggccataatcataattcgaccatatcttaaacttttaatgtcatcaagtttatagtttttcttatgttgtaaacccatgatttgtttaattgcttgaatttcagcatttttcataatttgatcaacacttgcttctctgacattaagcaatttacctctcaatggataacaaccataataatctctaccaacaactgctaaacctgcaactgctaaagattttgcagaatcaccttctgttaaaattaaagtacatttatacccatccttggtacctgctctattagcatcttctaattttgggtaaccagtaattctactttttctggaaccatcatttttctttagggccttatcagcattttcttgggcaatatccaagacttcatctaaaataccactggcaagaattttcttaacaaatttttcaggtaattctaatctcttaccaccaaatttggatgcttgagttgtcaaatattctttagtttgggaggtgaaagctggattttcaactaaacaattgataaataaaaacatttttgatttaatttggaatggtttaatcattgctttcttgtttttctttttgatttgttcagtaattttaccaacaatcatattagaaacataatcaacatgagtaccacctaaactggtagcaatagaattgacaaatgagacttgattgaaggaaccatcagagatacagaaaagcaatttcccatctttcatttataatttcatgaacaatggtaggtaatttctccactggttcaggagtcaagatactttcattggtatcttctgtattattcaacggagttccatcttctgtttcaattttaagtggtatatgaggacgttcctccttttgtttttcaatagctttgacataaagttcaacatattgtttaaaatttgaaattttcaattgttcaccatttaaagtaactttaatgcctctaacagaaccacagatatcataaactcttcttttaaaaataccaacaatattatcatctaattgagtcataccaaatttagataagtctggtttaaaaataatttctgtaaattcacttgttttcttatatgaagtaattttaggagtaccaacatcagacatattatttctccaagtttgagtgtattctttaccatgagttttgtcagcagtatgaactgtaaactcagttgagaaaatgttacatagttttgcaccataaccatttctaccaccagtaactttcttttgatcatcatcataatttgaagatgttaaaagattaccaaagattaattcaggaatccaaattttttctttatcgtgaatttcaataggaatacctttaccatcatttttaacggaaataatattctcaacgggatcaattttaacatcaattcttttcatggaaggatctctaattttattatcggcagcattgactaaaatttcatcaaaaattttgaataaacctggaacgattgaaattgttttcttctccatgattttggtttcatcattataaacccattgttcagatgaatgttgttcaacggatccaatataagtatcaggtcttttcaagatatgttctaattgagataatttttggtattgatctgaagctgaagatttcttagatttggatgtagttgtctttgctttcttttgcacaggaggtgcagaatcagatgagtagtattcttcttcactatctgaagtcatttttgaatagaataaagcttgatttgagttaaaaatagatgtacaattactatttaaatttacgtgtttcgtgtattgtagtaaatttgaattagaaaacaaagaagctggaggtctaataaaataagataaatgtaatgtaaataaagaagtacaatatcttcttaccattacacttatcagagactgtaaagtttgctgatagaaactgtaaacactttcaaagaagaatcgaaaagtaaaaaagctcatcaaaaactaattcaaaatgcaaaactagaaaaaaaacatgtcaaatttcagattgtaaacaacaaaagcaaaaagcgagacttcccactgaaaccacccattgagaagtcgataacgtgtaagtcacgataagttgacatcaattttctcgttttcttaacttctccttttttatcactctggagagaggagtctattggatcggtatttacttaaaggtaaggaaacattatcacttcttctaatatctcaacaattttatctccacatcacatacattatactaaatttatagattatcatcacaaattacaccgatagaacaatggattctgctaattctatacccaggccgaattcaaatcaaccaaatctaacccagggatcagtatcggctccggtacaatcagttcaaactcctagatctaatatcaatcaaaaacctgaatcaacatcaaaaattttacctattaaacaatctacaatgatagataattctaattcagtgcaaaaatcaacaacaaaagattcaacaaagtcatcaaatatccaagtaacaaataatgctacagacactgctaatactactcaacaaactacgaaacctaaaccaattcaaaaacccacattggcacattttaaacctacattttcagttcctaaagatatttcaaatggaaataatatcaaacctacatcaaaatctacaaagcaattacattctgttcagcaacagcagcagcagcagcaaaaacctataatgatgcctaaaagtgataaaatgcaacgaactaattccctgcctataacttcaaaacctatccgacatacacccgtacctattcaacctaatcctaatactgcaccaagtgcatattttcatcctatagcaatcaaaccaaaaccagtaataaattcatccaataaatcaaatagaagtaaatccattaattcagttaaattatcacgttcaagttcattaaatgccgcaagtcacttatcaaattcaaataattctaaaatgaatgttgatgatacaattaaattatctacatctaaaaattgggtcttacctccacgtcctaagacaaaaaaagttactaaaaagaaagataaaaaagtttcaaatatgaaatcatctatcgttaattcaaataatttaaaaataaattcagtaactacaactattaaaaaatcgccctcaactactgctgtttcatcacctatatcatcaacaacaaaagatgttaagaaacctttaactactacaagtacgaaaatggaggaaaagaaaaaaacatgtactaaatgtactatatcaccaaatattagaagtgtgttacttgaaccatcgaccggtaaagtttccgtgaatgcacaaatacattctaatattaatctttacactaataatgatgatgaattgaaagttcaattacaacatgttactagagagaatgataatttaaaaaaaatcttactcaaattaaatagggagattcaaactttgaaaataagtaaagaccctgttgaaaagaatatatcaactgcaaatataaaatccacatcaacgatggaacgtacgaaatcaatagcaaaacaatcatcctcgacaaatgatagtaccaccgttaatgttcctatcatcaataaacctatagtgaaaaatgaagcaaatataattataaacgatacccacgatatgaatgataatatctccaatttattaaataatgcgaatactattgatcctgttaacctttcttatagtttagaatctaaaagacaaaaagttttaagtttaagtccagatcatttcactaaatcctcaaagggagttaaaaaggaatttcaaaaatgtaaaaaatgtgaagttggtgaaaaatgcacagtgtgatcaaggaaagaaagaaaatggaaaagagaaatcaaatgaaaagcggaaatcgaaagacgttaagataaaggttgagcctaatgagaaggaaaatgcgaagggtaaacaggtaaataagaaagttgagaaggataacggaacggaaatacctaaatcaacatcctcatcttccttaattagtgggatttttcaagcagtttcaagaaatagtattaatatattaggattgggtaatagttccaacaatggtataccaaaattagtgaacctcctggtcttaatacattaaatacgatacttaaacgagaagagatcatgaagaagctgaaaagtgaagataattcacatagtacaacaaatattgaaacaatttccaatctggatattgatatgattgatgataatatatgtggtataaacacttctaacatagataatgataattcagaaatatttgatttcactaaaatgaaaaaagatagttaagaaaaacgattttgatgaagatatgatcttcaaggatatagctgcaaatattgaaggcaatggcaaaaagaaaaacatttctgataatgacgatgaattgctacaattaattgattctgaactatcacttgatccaactccgttggtttcaccagttttacttaaaactatgaattcggctaattcaaatattagtacaaatataaatattaatattaatacaaatacaaatacaagtattaccaccagtaaatctaaagaacaaatttctggagttaatatgacaagaagtaagagtaataacagtggtagtgatatttttaatagaagtacacttgcagatctaaatctgttcggaaatggagatgcaattatggatagtgaaacagttatgcttttcgatgaaattgctaatgatgatgggataatgagaaataatagagagttaatcagtaatgataatgatgactttatgatatattagtgatatatccataacgataatcctggatactacttctttaatgacttaatgtgtataaatttaacgattttgaaaaatagacttacgtaagtatacaatggactagacgcgactgtttttatattaaaattaaaaaaattattaatcagtacaccaaaaatctcatccaatggttacgcagcattcaattagaaatttactacctaccctcaccaatatatagaattggcaaattgtatacatgaaggttgagagtctgatacatttgaatccttggaaagactttggaaacaacttaataattactgccaaaatgcaattcatgggtgttaaagcatacaaatttccacttgtcaaatactactggccattcttcattggatgtaagtattagtctgatttttcaatcaattattcaaaattttatcaattatcaattttttgaacacaatactaacataattcaatcctgtttacttatttattatagttggtgttactactgttttaatctcaaaggcacaaactgctctttctaacactgaagaattcattaacgatccaagacatccaagattcgcaagtggtgaagttgaaaagaaataattttgctagcttatcattataataatctcttcaattatttatttataaatctagacacttagtaatgtttaatgtcatcatatttatttatttattttaaaacaaacaaaattgattcaaaaaaaaaattaatgctaatttaagatcgataaaaaagattaattgatatattgttatatcatcgtagttttcaaatcttacaaaattataaacaagttttttaaaaacaaaactttcattatatattatgttgttcttcagcagcatctaatgcttcctttaaagtttttaataattcatcagttttttccattccaatacttaatctaactaaatttggatcaacaccccatttagcaacttcttctaattcttggaaatgtgctaaaattgcatatggacaaacaagtgtaaaatttgtacctaatgatggaccctttgaaagttgaactgtattgaaaaagcaaattgcatcagtttgctccttaaatactattgacattaatgcaccataacctccattatcacgtttaactaaatcataatgtctctttgaactatttgatgaaactgatggataataaattttatcaattaatttactatttttcaaataattctataactttttctgcattagcattcataacttttgaacgattttggaaatctcttgaattacgttctaaataaattgcatcttgatcccaaaagaaatcttcgtaatcttctttcataaattctttgatcttttcataatatttactttgtttattaactgacaatgaacctgacataacatttgaatcacctgagaatattttagttaatgatgagacaacaatatcacagtatggtaaaatattgacatttgatgaattaccaacagtatcatcaacaacaactataaatccaaatttatctgataattgtttgattctaataatatctggagttcttaaaagtggatttgatgggaattcacaaaataatgatagtattctttcaccagattctaaacgtaattctaaatcatctaatgattcatcatctccaaatccataaaaatgaacacctgcaccccattttcttaaaatattcaatgtatcaacatatgggaaaccaaaacaaacagatttaagtttatttgcatcatttggttcactaatatttaatactattctatgtgcattaaagatagctgccatacctgatggataaagataagtattttgagaatcacaataatcattatcaaagtcagatgataatctctctaataaaatctttttagcttccttagcaaatcttaaatctaaattacgtccaaatctttcttcaataaatgttgcactttcagttttattgtttaaattattatttctaatagagactgaacttcttgaacttcttgaacttcttgatgctcttggagattgagaatgatttgatgaaccatttgatacttctgatgatcttttacttttgatttcagctgtaagtttatccttcatttcggaaaggaaatattcggctaatcttgatgaaataccttcaccggtatgttgccagtattgttttgtaagtgaatataagttagatgggaaaaagacaatagcaatattggcttcaattttagttgattcttcgtcaacagatgcaggtggaggtgttgataattgtaaaattctaatattggccttaactggtggtgataaagttaatgctttctcctttaagaaatttctacaacgttttgcaatattataagttggaaatataaaacatttttcattatctcttgcataagatgattcaatcaatttggataattgttgaatatcattatgaatgaaaaaatcttggatatccagaattcattttattaacaacccattcctcaccttcttcataaccaacagtggcttcccaagttggaagagtgacagagacagcatgttgagtattgttaggtataggtgcgccaatagtttgagatggtatgttactagaaggcatgattcactgttactaaatgaatgaaataagaatatacactctaactccacaattaatttgtatatacactttcccatgttaatgattccaaggtgaaaatcaatactcaaaataaaatttattattatgagtaatatcagcagctcggaaatttagacttctttttacgtaatcaacttttttttcgtaaatttagaactacaacatcatttttttttgttttgatgccatcggttttcaaggatggatcactggaatgagtggtttaaagtagtcgaagttatccgtttttttagtcaatcgacacttgaacaatgtcattccgtcctaagacaaagtcaaaatcaaaatatcagaatgggttacctcaattttattcttacaaggacaaagctgtctcaaataactattcacaacatgaatatattcgtttaataaagaatttttatcataaatatagaattttatcaaaagtatgtattgcagtgtttgcaatatatattgtgtttggatggatgttcaactcatcaatgggatactattcatcatcctcatcaccttcaaaatctcaaaccccagctcaattatggtctgatcgtaaattacaagttaaaactgcattccttgatagttggaatgattatgttaaacatggttggggtgatgacgtatattctcctgtttctcaaaaaggtcataatatgggtgaaaaacctttagggtggataattgttgattcgttagatactcttatgttaatggattgtaaggatgaacttgaagatgctagatcttgggttgataaagaattagattacaatattgatgttgatgttaatgtatttgaaacaacaattagaatgttaggtggtcttttatctgcacattatttatccgatgatgatgatactatttatttagaaaaagcagttcaattaggaaataaactagttactgcgtttgatgataaaacaggtttacctgtaatggaacttaatttacagagtgaaaagccagggaagaatggttatccagcaaagggtgtttcaacatctgaaatatcaactttgcaacttgaatttaaacttttatctaatttaacaggtgaagcatatttctggaatgctgcagaaaaggttaatcaaatattagattctaaccaattctcaaatccagaatatgatggtttagctcctatctatgttaatcaaaatactggtaaatttaatggagatttgatccgtttgggagcccgtggagactcttactatgaatatcttttaaaacaatatcttcaaactgatgaaaaaatttatcttgaaatgtatcaaaaggcatatcaaggaataaagaaacatctcttaagacattcaactccaaataatttagttttcctaggtgaacttccaaatggaattggtaatcctgtggattctaaaatggatcatttagtttgtttcattggtggtttatttgcacttggtgctactgaaggttttacagaatctgaagcacgttcaaaaccatggtgggatgcattacgtgaaaatcaattgaaaatgggtaccgaactgggtaagacatgttatcatatgtaccatgatactctaggtacaggactttcacctgaagctgttgtttttaacgaaagaattaattcagaaacaaacagcaaacccgctggtgcaataaattccctgaatggggacttttacattccttctgaccaaaaacataatttacagagaccagaaactgttgaaactttatactatttattcaaaattacaggagatattaaatatcgtgaatggggttgggaaattttccaaaattttgttcaatttactaaagttactgataataatggtaaaagtgtaagatacacaagtttgaatgattgtactgttaatcctcctgttttagctgataatatggaatctttctggttagcggaaactttgaaatatttatatcttttatttgatgatgaaactggaaactctcttggatttatgaaaaatggtaaaaagaataaatgggatttaagaaatatggtatttaatacagaagctcatccattacctaagtttgataaaggatcatttggtaaggaatttaaacatggtgaatctccaataattaaagaaattgagtcttccaataatgaaaagatagaaagtaagactaataatattaagattggggaagctgttccaaatgaaaaggttgctaaaaaacttgaagctgtcatggatgagccaaaagaaaacaaaaaagtggatgacgttagtattgataagactggtaatttacaaattgaaaagaagaaactacctaaagttcatgaattccctgattcaatcggtgatttagatacacagttggaagaaaatgcaaaaattggaagcaattagggaatcaaaattggatgagtcaattaataacgaattcaataaagtaagtcaagaagaaactaatgaatttatagatgctgaaaatgataatcttaatgttgcggaaaatcttgaagcaactggtaaagttcctgtgccgaaacatgaaattgcaaaatcattagaggacaaattcggggatgcattgaaagagccagatacgcttgaaaaacatgttaagattgaagagattgatttggctgatttggacactaagcctgacatggatagtattgaaatcagtaaaaaaattgcagagaaaatgaaagcagaaggtgaaaagccaggtatgaaacaaactgttgctaaaccattggatgaacaagcagagattctgattgaagaattagatgcatcagattctggggatttaaaaaatttaaaagttgatttaactgatgaactgactttagatggtgaagttcatcaaataggaatatctgaagatcaaattgctgatttaacttctgatacgaaaatagttaaaaataaaaacttattaaatgaagaacctgttccaaaccaagacaaagcgaaatctttgaatgaacagattgctgaagtcaacaaagagattgaatcagaatttaattcagaaaatttgattgatgatttacatttataataattttaacactaaagggtgtgtttgataccttttttcgaagctttcatatttgtattttgattttaaaaaatataattttacataatgtatactttattatacaataaacgatgaactgatgacttatatagttttgaatcttttagcagcacttctcattaacttggtaatatcacctttaccagtggctttttcttctgccttagcttcagctttacgttttgtagcttgttttttctcaaatttttcagcttgttcttgtctggatttatatcctaatttttgaagttcttcacttttagctaaaaattctgggtcttccttttccttgccaactaaccactcaagcaatttaatttcttcaccataacctgattcactgccatcttcaattggagtttctaaaattaatggaatattatccaatcttttgtcattggccaataatctaaaacattcaagacctaagaatccccagcctaatttttgatgtaaatctctgtttgctcctaatggtgccattgaatcgtttaaatgcattgaagctaaatgctcaaacccaactttctcttcaaactctttccaaaatgcattccatgaatcttcattactcaaatcataacccgctgcaaatgaatggcaagtatcaatacaaatacctactctctttggatcatctaacagttggaaaagtgcatggaaatcatctaaatttccacaaacataactaccatggcctgccatattttcaacaactattctaacaaactcggtttccttcattgctttattcaacccactcgctaacttacggacaccggggctagcaagtatattattttcatcctttatagggacattctcacctaatgaagagccagggtgaaagttataatgaccaatatccaattgttcacatcttttcaaatcatcaagtaaacagttgaaagacttttcccacttttcatcatcagggttagccatattgataaaatatgatccatgtggtaaaatgtcagttcttggattataaccatgttctttacaaagatctttaaacgtttttgcatctttatcagtaatagcaggtgattcccatcttcttggagacttcaaaaataatgcaaatgagttacttccgatcgttattgcattggtaactgccttgtataccccacctgacataccaacatgagcaccaaactttttgtttccggttaaaagtctttcaaatgtacgtacctgtaccttttttgcaactgctttctttggtggcattttttattcttttattggttgtttttaaggtacttaaaagaagttcatcaaatcaattattagttcatgcagaattcgggtttactgaaaattaatgtttgggggattattatgtaatcaactcaatacgaactctgtaaacacccgaacagagttccctaaacattgcaaaattattcaaagtgtatacattttagagcttgaaactacaatattatataactaacttaaatagtggtatcaactcccctgataacaaacatctaattctccccttgaaaatcttgtgaatgcatcatcattaacaagtacaatatttctgataaaatggccatcaaaaatctccttctctggaaattcatccggcgttagtggtataggtttgtcagatttgaagataaacttgttaacatcatccgatgatttaaaacttaatgtgtatattttctcttcaaatctgttcattttcagatataactcaaaggtatccagtatttcatactctcctgtgttaatgtttcttactaaaaaaacatcatcttcaccaaatgaatatccgcaacaatacatttcgtgtgtatttgcagaaagggttttcgttgagtcttgttgtatctgtgacccggtcgccaaaaattcttcactttgtatcaaatctgacggagatactgtttcaagactagatataccgttactgagtgcgttttgggtctccggaataaagttgtttggtggttcgactatactatcagatacattataatcttgattagcagtggctgattggaaacttgctgtttgattggtataatttgactcaactatggatacagtttgatttgcattatcctcacttatgtgttttggtacactactattatcaataataattgactcagaatgatcagcattgttttctgtagtatttttttcttgtttcagtatttgtcttgaaagttgttggatagtttcaggatagttagataaatcgttatcgccaattggcatatcattcaacagtcgtacgtttccttggttattattgttatcaaattcaacttgagattgtgtagcaatgggtctttgagttataaattcattagtctgtgaaccaaatacacctatatcatcaacaagctcattgagtccgtatttctcatataagtcaaatttccaatttgaaggacaattactttgcaaattagttaaaaatcgtatcaaatgctgatcttttgatacacgaacttttttgataacatctgatttagttaatgttctaatggaacctttacaaaaatcaacctcattcttatacctctttaaaaatccattaatttcaactaatattttttttgaataaacttcatcgtttggctctaacccaggtggcggtagattattagtgttaaaaaattgttgagcataggaatcaccaagttcgtattttattactttgttttgtggtaagtatgatccatcattcaattcacagtgatgtgtataaaatcttgaagtttgtatgcaactattgactgtaaaatctgttccgtatatattaacaaaattgtactgaaatctgtgccgtacatatgaaagaagcaataagtatattttagctggttcattcactctttcattgggaaagtttgatatgcttatttcatcaactgagtattgtttcatcgtatcagtattgtattatcaattgatatagttgtaaaaaccaatgcttgaataaaaccagagacacgaagatcataaatcttaattttctattatgaaaactatttttgtggatgtctagtaaaatttctttaacctttacatcattacttctatgcatgttttccacgttgaatatatagtattcgcaataaacaaaaacatttattagatgaatagtatgtacacactgaactgttagacatggagaaacaaaggagaaaaaaatactaacaaaatatttaatatataggaaataaacaaatgaaacttccaagatctgttcttgagaggatgagagcaccaaaaggtgaatctttcaatgaatctgaaccaacgactgctgaaggctattatgatagagctgttggtcatgaagaatcaggtgacaggtggtttagttcggatttatcaaaggctatacgattttattatcgttcacatgttgactatttgaaggcattaaagttggaccccatcaatgaagatgcattatataatctgcccagactcgaatatgaagtttacagtaaatataccaaggaagattctgtcattttagatgacttaacaaattgtgctgatgtgttgaatgataatggaaaggatggtttatttcaagatattcaaggaatatgtaaacatttcgaatcaagtatcagtatacttcaacagtctggaaatgaaagtttgattggttatgatttttattttaatattgccatatgctattctgaatatattgatattctatgttctaatgctcaaaatattatggagattcaacttggcgatgaattgacgctttcaattgacagatgtatgcaaatgttcctaaaattctttgagcatatcaagcacataatgaactcaaagattggtgatgattctgatacaattgaagatattgaatctatcacaaatggttgtatcgagagttacagaatgattgcaactgtttatgaaagtttatactccgaccaattgattatattcatggatggtgtaatgggaacatttgttgaagaagttgataccattgcaaacacacttgtgccaattatacaaaatataggtctgttgaatactttgaaaatttcaaaattaaatgaaagatgttcaagagtgttaaactgtgatgaatttttgaatctatggagttaccacacagacctcaattctaatcttcaaaaaaggcttatggaggcctcttcaatgcgatcattcatagataaatttgaggttgtttcattggaacttcctattaacaataaatggagtattttgggtacaatgagcaatcaatacagatcgatcacggatatcatcaaacgagaaatcactgatattgaaacatccaaatctatggaaagtgatttactaagtagtaaaattattttgatgtgttcaatctttattgaacgtgccgatattgaattggaaagatcactggtgcctataactgaagccattagcagtcgaactattttacagaataattctaaaactctactaaaaaatgcattgatcttttccaaaaaatcaggaggaataagagaatccataatgggaaaactgagtagaaaaaagagacaaagagaggctgctatgagattatgtttattagaaggtaaacatcaagatgagtggaatacaatcatcggagaacaatactggcctgctgagttgaatacaattggtgaaattgaggcatacaagagttacttttcataaaaatttatagattaatgtgtactttagattagcactgaatcaccttttattgattctaagtactaatttaagcaaaaaaaaagagatatttatatcagaaggaaggcaactggtttctcctcaaagtcgaaactaggagattgttcacacttttccattgttagtcatcatcaaaacactcaaaaatagtttcctccgagacggggaattgaaccccggtctcccgcgtgacaagcggaaattctagccactaaactatctcggatttgttgtaaattttgtttggatggtactacttagtctcaaaaatgagatcacgtgattttacaaatttaaaataaatgttgatttaaatcattgtttaagggcaattttctttataaaaatgtataatttatgcaaagtatgcttaaaaagggttgttgacctggtcaaagctcaaataaatggatatttgtttcggttaattttatagatttttgaaaagactaaaaaattttttaatttctcaaaattcctgagcaaacagtacttcaaaaaatgcataaaaaataaaaagcacctttcatagcagatgttttaccactccaagagtgtaatgcattaataaaataaagatagtaaattacttttttcaaaatcgattaattttaaaagataaaacaaggtttacactaccaaaagacaaattatttatgtacttattagaagtttagtttcaacccagtaaaactaacatctacaaagatagcaattcagattcaaagaagcacaattcacaagaatatctagtaccttgcatacgttttatttgtcgtatgatagctatttaatcaactattccgttatctctaaacgagatagcgtatttgagcttcccttattgtgaagattacatctctatcttgagagtcataaacttaatattcaatgtttatcatacaactgtaaaaggaaatattctgacttaatgtatttcctaattgagtaaactaatgacatcggaaaaaaagcagtagtgacatgtttatctttttcccaattaggtaattcagaatattggaagatatgggagatttctcttcttctatgctaataaacacggttttaaagcatacagtaactaaaagaatacctactagtacaattgaaacccaccaatatgcaccaatgacagtgaaccaagcagaaaaggcaggttatcgatgtaaaactccacaaaatagagatttcaattagggctgaaaaaggaaatctttttttttctacacagcgctttaattgttctgttgtgatttcattgttgaaaaaaactttgatcccagccaccagagtattttctgctctttccttttaattttccctttgatctgttatattcccttctagctgctctttagtcacattcttttttattgtattctgctctatcacacatatttattccgtttctgttaggtacctcagcttagcttattttgcttctctaactatattctattctttaaaaactcgacaaactatatttaactgtgctgttctgaacaagttattaattattttacaatttatataaaactgagacaactcagttttctattcttttaccaactttattattaatcacttttaattaataattatattcaattgtcaacttacgggtgaaattaattaatatcatcaacagacattcagattaagcaaatcatccatctaattacattcctttatttcaatcagaaaaaataatcatttttttatcaatgactctctttaattcacaaaataacccattgatcgttccttctcattctgaatcttcaagtttaagaaaaaaatttatttgtgagtttacaccatctgaatccgacgaaaaagatatacaagccaaccttaaccttaataattcgatgccaagatcattctctcattcacaatcacctaatccatgttgtgacaccaatcttggatagaaaaagaaaattcgaaacagaatttccttctactccgatttacaaacaaaaccccaatttaattactcctccaagatcaagtaaaagatcgaaaacagcaccatcatcaccaattaattcagctgagatatatgaaactcccaaaacaccatcttttagacatgatttcaatatcaacttacctttagttgacaataataatatttataatgaaggttcaaatagtaactatcaatacataatgtcaagcccggaatattatccaggtgataatgatgctgtaaatgttacacctccagaatcagaagaaagctcacctaaattatctgctgcttctttgaatcaaccaagtgttacactcaatagatcaagcaaagatagtgtttatcaatatcattaccctgatacatgttatccatttaacatttctggtagttcggtaagacaaactgatattaatctgaaactgaaaacttggagagctacatgtacagagaaagtaaaacatgaattcaataaatcactgaaggagtactcatcatattctgaaaaattgagttcagaatcaaaggccagagctgaatcacttaagcaagctgttcctgatcttcacaatacacaaatgtttcctaatcttaaccgactcaacaatcttattaacaaaggtattagctatccaatgataaacaaaaatgatggaaatcttgaaggtattgcaaaagctaaagaagaagcacatttgttgttatcattaagagataacagattccaagttttcaactcaatctactgacaaagaagccaaaattccattacaaaatgtgacaaataaagttcaattaccaccaatcagcgaggtacttaaactaattccaattgacaagtcaacaattcatccaagtggtttatcagcccttgaagtcgcacaatacagaaatccaaatactatgtctattttattgaataaaaacgaaactaatttttacaacggaagggaaataaaattaggccaaaatattcaacaatttgattgcacttatcaaccacaagtatatcaccaatacatggcacctcaatctcaagccccaactatagcaccccctccactcataacaacattgcaattaccaaggccaattccaatgacactcccagtcatggttaataaaaatgaaaatgttcaagcgataagaaaaacaagaggatctaatgcatttgacgacctgaatgcccaattaaaagatttaaatcacaccaaagagccaccaacaaacaacactaataacaaaattgcatcaaacacagcaaccaacaatattaagcaatttcaaaacaagttcaaaactcaaaataatgtcctaaaagttagtaaaactagaagatccaactcttctgtttcccaaaaaagctctaatagttcaagtagaaaatcttccaattctgaaagggaaaaatatgtgttgaataatttaactacagaaaaaatttcccaaaagagaacaaggtcaagatccagatccagatcagcaactagaacatcatcaattgacagtataaagactactgaaataccagtgtccatgcaatcaacacctaaacttataacagatgttaaatataatgtcaacatcagcaattcattattactgccttgtgaaaatatgatagtaccaactccaaacaatacacagccaatcaaagaaaatggagttttcaccaatgaaattcaacatactcatacacacagccatcctaataaccgttcaaataaaacatgtatgtcatgtcattcatcctcaagcccatgttggagaccatcatggtcaccagataatgggcaattatgtaactcatgtggactcagatatcgtaaaaccaaggctagatgttataatcaatcctgtttgaaaattccatcaaaaagtgaatggtcattaatggtaaaacgtggaaaactgttacttgatatttatgataatgaaggtaacgtggtaggcaaagaaatgagttacagatgtcttgattgtgattcagcaatggaaatgactctttgaaataagagttttattatttttagtattttagtttttgtaatcaattcataattaattagtttatatttttgaaatttatattgatgtattatacagaagaatttgtagcttataagtttacatatttgttattaattgtttttaaaagcatcacgttaaaatgtaatcactactaatagtcagacatggtggctcgtgagacattccgaaaaaagtaatgttagcgatatctgtttgatatctgttagaaatttttttaacacagcagacaaatccatcatcactgaaatcaattcaattaatggtatatttataatactgttagtaaatcttcttctgcaataacaattttattcaagcaagaaaataaacatacccgttttaagcaaaattgagaatgcgatgctcattggtttcttatcaactagctaaaactgctaaattgggtctacctcctctcccaaacctgccgaatgaggtacttctgaaatataatgcatttacttccaaatctgtctcaaagcttccaaacgaaaattatgatagaatggagtttttaggggattcattttgtgagtttctatttgttaagtctcttggcagtaattttccaaatcttgatacatctagcttacgagctttttatttatccagtaatgtaatggcaaaatattcattacattatgggttaagtgataatttgaaaatttctagtaattcaggtcttcttaaagctaaagattctgctgatatttttgagtctttctttggtgtctttgcatattgtgttttttcatctaaaagtaacgagtttccattgaaagatagatataaactgtttaaagaaagcaatgattggataaatggaataatatctgaacgtgttaaagtgtcaacaaatgaaggaacagataaatcatttgaaatttcagatttggatttttacgttgacaatacaactgatttgaaaaagactacggcaactatctcaatcgagaaaaatcagataagagttggtaagtcgttaattaggtttcttttgactttaaaaatgtttgaaacatatccaaatttttcagaaggagatatgactgcactcagagaccgtttctatgagacagatgcacttagtattattgataaaaaactctgtaaaagtttactccggcgaaatccggcagagcataaggaagatgcacttttactattaggaaagatgttacttaaagataatgatattttggaagtttatagcaacatttgtgaaataaaaggtttttttgaagaggcagcaactgaatattttggtatgaattctgaaaacttgaatcttgttgatgcattaaagttgttagatccttcatcgcccccgccactactatctacaacacaaaacaggacagcaccaagccacatcaccctagacaattttgaacagattgaaactcaaataattttgatgggtaagaagagtaagagtgtagaattgttattagataaattcaaattttgtaaaagcaaggacattcattttcaagctacagttaatagagacttctcagcagaattaaaagctttttatgaacaaaagataataactaataaatctggatcctcaattacagagacactcgaatttgttttaaactctctactcgttaaacaaaagtttaaaccatatatagatgaagacaaacttaaatattttgataattatttcaaaaagatggaactttctgaatatcttgctttttttgacaagataagatttcccacaactttagaaattaaagaattgaaagctcaaggttcatcaccaccaaatatggaacatattacgaccacagaaaagcaagaattatctgatgctcctgaacaatctcaggatatatcaaatgagcactataaaaataccttaccccaaaatcagattagttccaactccacctccaataaatcaccttcaaaattagcagtatcagttgaaaagaagtctggagacatccaaaaagtagaaactaacataaatacaaaagtggtaaaatctgaaattacaccaaccatgaaagacaaagctgataataaagaagttttaaaagttgagaaaaaaccccaaaagaatgaaaaggctccagggaacctatatcccaaaatactagatggaattcatgtaatattcagaaactattatatcaagcagaatgaaagcaaacggcaactttgagttacaggaattaaaatcatggcaaaagtataattacactgtttccagcaaaaagattgcatttgaagctattattattccacaacagattgtgcgattaatgttagttttgaaggtgtagtttttgtcagcgtctcaggaaattcattgatcaatactttaaatacagcactaaatactgttttatctagtgagaagtacaaagggattgcaaatatgaccaaatttaaaagttttgataaacaacataaccttaaaagtggtaaatataacaatttaaacgaaataatagatgcaattgaattagaatttattcaaagtggaaaaaaaattaatttcttaggatcagatacttggaaggcgtatgaatatttggaaaataaagaaaaacttgagtttagtgctgaatctaaaaacaatacagaacacctcttgaacataaagtacaaaggtgttacagtaattgaaacagcaggaaaatctctacatgatgcattggatgtgtcattgagaaatttactttccaataatgaacttttaacagatcttcaaccaaatgatataaacacaaaaattataaagcttaatagtattgatcaaataagaaatattcttttacttcaaagaactgataaaagcttgttggatatgaattcttggaaacaatattattttactactacctcaaaattagatttcacttcatttatcaacgataaacaaaaatctaaggttgttattagtcataaaaatgtacaaattactgaagcttcaggcgattctttgtttcaaggccttagattctgcattgaataaactatttgtctctgctaaatacaagaaacttttagatagtaaaatgttagaaagttatgattcatttattgataagagctacgttaaaaagctggttgaaaaaatagcaaaagatggcaaccttgataaaaatgatcaaggtgacaagaaatatgattttgaaaatttgttatcatggaaaatctttattgatactacacgttgtaaaactatacgtttttcaattaaagtaaaatcttcaaagtatactgttatgctagtggttaataattctccttccatcacacaaacgggtaattcattaactgaggctttagaccgagctttatttactttcatacacagtaaatgttacaggggtatttctgaagtaaacagattgaattattattttgaaaacacagaagttaaaacggttctcttgaaaaatatcacccaaatcaaaaacttgatattatcacaaaatttaaaaactgaaaatgacatgggttttgaagatttggaatcatgggataagtttgataaaatgtttaataattctgaagatatagttgttaaagctctcatcagtaccgatttaacttctacagttggtgttttttataataatgaaattgttattagttacacaagtaagtcattggttgaatccctagattattgtttggatagatttgttaaagaacacgaatctatattgaataaaaagactaaaactgtacctgcaagtgaagaaatcatattactcccagctccagtaaagaaagttgaagaaattaaagaatctgaggtgatcgaaaaggtagaaaacattaaagaaccagaaatgatcataaagtctaaaaaaatcaatcgagtcgaagaacccaatgaacctgaaacagtagcagtgaccgatgaagtagttgaagaaattgaagtgaaagacacggatattacagttaaggtggaaatgaaagaatcattagttccaagtaatttggaagaaaacgcagtgaatgctataaaggtgattgatggaaacaaaacggaaaagttattggatatttcaaaagaaggtaaagaagcaccatcattatttcagcaaacagtttatcatttcaaatcaatgttcagaaacggatgagcaaaagtaattttctgactatataagtttcattagaaacgctgttatcattaattgatgataatacaatattctgtacatacactatctaattttataaagtaaaataaataccttggtaaattaaactcggctcagcacatttcaacaaaaattttttttaaggaaaaaaaaccaacttttgccgcggtgctccaaagcaattcccatactcatccattttgggaaattgtctgccaataattaaggtgtttacatgaattattcaatcattgataatactaactagctgtagatataccaataaaggtaattaataaaatctatatcagtaaaataaataccgttctttcaaagaatcacctattttttgttattttaatctaatattacaccgaaaattatacttttatccataatacaaatttctttgtttactaattaaaattttttcatcgacaaattcactggaaatatttcaaaacgttgaaatttttttgtgagcaaaagaatgtacagccaaactttatgaacttcccctctctttttgaactttcttacttttagtaatgatcaagaccattgtaaaaagatttaaaatgacatcaatgaaaccatctatcccagtatctgaatctgttagttcagttgatatggaaattggtagcagctggactgattctaatacaagtattagtagcaccaatagttatgaagcaatggttaaagttattcaaactaaacctagatttcattctattaaagatgcaattcataataaaattttaaatttgagagcagaaggtagagttgatgaaagatcattctatatctgtgacattggtgaaattcgtagacaattaaatttatggaaatctgaattaccatttattaaaccatattatgcagttaaatgtaatcctaatgaagaattcattaagaatatgattagtattgaaccagagatgggatttgattgtgcattcattagctgaaattgaaacaattcttagaattaatagatttattaatagggataatttaatttatgcaaatcctattaaaccaatttctcaattaagatatgctaataataatgatgttaatttgacaaccattgattcaattgaagaagttgaaaaaattgcaaattttactgatggtaaaatgaaagttttaattagaattcaaacagatgattcaagtgcaacatgtccattaagtgttaaatttggtgcaaatttacaatattctgaaaaaattgttaaaaaatgtattcaattaggtgttcaaattagaggtgtagcatttcatgttggatcaggatttaaagattctaatacattaggaaaagcagttgatgatagttataaagtaattgaaattattgagaaaaatcaaggtaataaatgtgatataattgatgttggaggaggattttcctaaagattcatttaaagaatctgccaagatactacgtaaagagatggaatttaaatttggtaaattaatttcaaatggtgaaattaaagttatttccgaattaggtagatttttaagtgcaagttgctttacattagttagtaatgttattggaacaagagaagagattggaggtggtaaaacaagagtttatttaaatgatggattatatggtaatttaaattgtattttatatgatcatcaagaagttgaaccaattgttataacatctaatggagaatttgtttatcaagaatcaaaatcaaatgataagaaactttattcaatttggggtccaacatgctgatggattagattgtattagtaaaagagttgaattaaattatgatattaaatgtggtgattttattggatttgaaaattgtggagcatatacaaatgcagcagctactaaatttaacggatttacaaatgaatttgattatgaatttattgaaagttgacatgatatattagattatatactagataaactatatttaaatttgtaaattaatgctttttttttctattccttcagccccttcagctatttaattttttagttgatataggtattatatcatttgattcccttcttaaacgtttattattattctgtgtattaatattattataatcaggcaatgaaccataagtatccagttttaaatctgaagttgaagaagcaaaattataattcaaatcatcagcttgaccagattgtgataaagtaaatgaatcaatggaaggatcaagtgaatctgctgataaaggtgggaatgatctatttcgtattttttgtgaatttaatgaagtataataatttgataaagaatttgataattgaataccttgatcaattgaatcattaactacttgtaaagcttgaaatggagataaatttgagaaaggttggaataaacctgaagataaaggttgtgaagtggatttttgttgaggatataagaataattcatagttcgaatgataattgaactgtgatgattgagattgtgataatgaaatacttaattttgtcagattatcagttattttatgattaaccatatcagtgtaaggtattataaaattaagaccatcatctgaggaaattaattgtgggtataagttatgtaatggtgtcatataaggtaaagatattataatttcctctgcaagacaatataaatgacaaggtatatcaagtgaaattgtatttaaagaaggatcacttaatgtattaatacctaatgaagaaagtgacatataaggtatatccattataatattatcaccaaaaggaattgataaacgaatagcatttaattcaggatgaaatatattacttgataaacgtaaataccaaatatttgaagcgtaccttaaaagatgagtatcaggtacatcatgaacggaaacagttttaatataatcactgaaaagagtacagttttccactgagggaggatgatcgactattttcaacatggtgttagaaagtagatgttttgtcttgtgaaaagtttccaaaaccttgaagtattaatttgaaataatagaaatagaaatagaaatagaaatagaaatcgatgccgtatgcatgtagcctggttggaaaaaagtccaaatttccgagacgtgaaatttccgaggaaatgtggtacgttaacataagagacaatacttaatacaatacaatacaactgttattttttacttggtgccaggaaccagacattatactggatcttatcaatttatttcttggaaattattctcctttgatcttatctacttctttctttctgttaccaaccaatgaagtctattaagtgtgtcgttgtaggtgatggtgccgtcggtaaaacctctcttttaatctcttatacaactaatcaattcccagaggattatgtacctacagttttcgacaattattctgcaaatgtaatggttggtgatgaaaaagttacaattaatttatgggatactgcaggtcaagaagaatatgatagattaagacctttatcttatactcaaactgatattttcttaatttgtttctcagttgttgaaccttcatctttccaaaatgttaaatcaaaatggatgccagaaattaaacatcatactccaaaggatactaaaattttattaattggtacctaaatctgatttaagagatgatcctcatgcattggatgaattagatgaacaaggtgcaattccagtttctgaaaatgaagcaaatcaattagctaaatctttaaatttagttggttatcttgaatgttctgctgcttctcaaaaaggtgttagagaagttttcgattgtgcaattaaagctgttatttttcccagaggaagaagaacaagtagaatccaatgatcaatcaaatacaaatgtaaatacatctactaatactaatacaaatggtattgataattcaactgtaaatgcaaatcaaactaccaatggtaaatcaactccacaaaaggctactgcaaagcaaactcctaaaactcatattcctgctaaaagaattaaaaagtcaaagaaatgtacctatcttataacacatgtgtattatagattcattcattcattcattatgtacatcttatcattattctctctatatttagatattcttagacgtttactttctttctttctttaattatttctcttattaatcatatacttcaagttaaattaatttacattacgttacacaacaatatactctataatcctaacattttagctctatcaggatgaacaccaccttcaagaacatcttcaccattagccttacgtttatcggcttctgctttagccttcttatccttttctgcttgtaatctatttaatctttcttgttctaacttgtcattctttgccttaatcttttcaactctatctttagaattaccacctccaccagcagttaattcaacattaattttcctccctcctaaaacacttttatgtaatcttaatgcaatatccattaatcttttactttcctttggatcttcattcttaaattcaacaaatgcacatcctttatcttgtcttaatctaatattacttggtttacaattcttaaaatgtgtattaatatcttcttcagttatcttaaatggtaaattaccaacaaataaaataaatcttggtccttcttccttttctttatcacctctatgtttcttacctctcctcgtctttctcttcttctttggtggcgcttctgcatctgcctttgcttttgcttctgctgcttcttgttcctttatttcttcttcacgttttctcttttcattttcttgaattaaattttcacgtgtctttaattcctctgctgcattggttgatgtcttagatttaaattttaatgcctttaattgcttcttactgagcttttcaacaacttcttctgtcatttgtctttgtgattataagaatatatacctgttcttgataatgaaacaaaaaaaaataattagtttatcaaaaaaaaagttatagtagatcaaaattttttttttcaaaacatgctaagtaaatttatccagcggctgtgctgtggctggtattgtctctttactatatgtcctttcatttcatccattaatggcaagaagggtagctataaaccttaatcaaagagtcaggtctgatagtggagggcgtggtagaggacgtggacgaggaagaggcgggaatgttgcaaatataggacgaaatgatatacccaataacatgaaaccaatagaaactgaaaataatgatgaattaacaactaataataaagaatcaacatcagaaacaccgactaataaacgaaaatttgaggaaattgatgttgaagaaatctacgatgatgaaataatgaatttaatgggatttaaatcatttgaatcaactaaaaataaacacgttaaaggtactgattgttatgcaattaaatttaatcaaaaaactgagtatagacaatacatgaatagagatggtggatttaatagagaattatcaccaactagacttgataagaaaaagattaaaatgaatctaaagaagaaacaaacgaagaaatctaaaaaggaatagcatcattaaaatatacgaatctattagaaattaggagtataaaaattactttttagctttaccaatagcacccactttaagaaacaaacttacacagaatgcagaaccagctaatgcaattgcaaaataatatgaatatttcattgcatgtaataatgcaactggatcattattttgttgtggtgtaccataagcagaatattttgattgaataattgtactatctaaaccaattgcaacagctgaacttaactgtaaaatagtattaaaagtacctgaacctctactttgtaatttcctctctaatgaagataatgtaactctatttgcaatattataaattaaatcagctccaacaactgttaaaataaatgcccaaaatggtccaagaaaataatttctatcaattgatactgttgcccaaataattgaagatcccagaaatcctaaacaaccaacactcattaaaattctaccaggtataatatgcattgtaaaacctgcaaatatattaactaatatacctgaaattggttgtgttaagaaacaacatgaaacaattataattgaataacctttaatattttcaaaatataaaactgcattataattcaacataccaaagaaaaccatccaacaaaaacttgcaataaccatacaaagacagaaatttttatttttaaataattgcattggcattaatggattttgtggaacatataattcataaacaacaaatacaccgataaggaaaacaccaactataagtaatgcaataatgtaacctgttctccaaccatgtggagcagatgtaacatcagttaatgagaaacaaattaatgtaaaagcagataatgataataatgcaccaatataatccaatcctttgaaaactttcttacaatgattccaatcaattttattatcatttggtaagaagataaagaccaaagatagctaaaaatccaaataagatcgtaaagaaaaattgtgcagctctccaatcaattgcaataatacaaacaccagcaacgaaaaatccagctgcaccaccaactggagctccaataccgaaacaactcataaccatatttttcctctttgaatctttataagttgaacctaaaaatccagctgcctgcaggtgttgaacatgcaactgatgcaccttgaaatcctctaaataaacataaaagaatataattatgcatgaaacctgcaataaatgaaaataaagcatacattgaaaatcctataatcattgcagttttcctaccaaaagcatcagcaataccacccattaataataaacaagcaccattagctaacataacacttgaaacagaccaagttaatttcccaccatcgacatgaaaatactcacttattggttgaagcattgtttgataagctgacgaagccatacttgcagctgctggaccgaaaatacataggaaaacacagataaattcttgaaatgcacttttgaaaattggtggtctctgttcaggatctatatataatgcagaataattggttttctgtctttcaatatcattttcattaataaattcatcatccttttcagatgatgataattaatttttcatcattacctaaataaatttcagttttaaaatcacgttctgaatcaatagaagatgatttatttcttatagttaaatcattcacttgtatattcatcactagcattattgtcactaatgtccgcctgtgataccatgtttatttgtagaacatgtagagattgagttcattaaagtaactaaagatcttttctgttttactgataacagtggaaaagtgtgaaaaacttaaaatttttaaatgtcggggaagatggaagaaattaccggcggatgcggtaattcgagcggcagttatttagccacagttatacattaagttaagtaaagtaaagtaaagttaagtaaaattaagtaaagtaaagtatttattgaacaagtatacaatgctgaagaatgtctatttaagggaggcagtgtatgcaagcaataactcatcgtatttagccttaagatcagtgtattcttgatcttttttactgattttatcctttaaatcagtgatagttttggaatctgcattaaatgtaacaccaccaccactactagtagttgttgttgaatcaactgaagagaagttagcaaagatttgttcctcagattgaacattattaatgaaagattggaaattccaatctgatgaattaatagttttatcacctgttaaacgcattgttaaacattgatttattaaatctttttcttcaataattgatctcttcaaaactggtatatttctcattaaatttttatcaactgtattatttaatttttcttcattatctttaacattccataattcaatattacaaatttctccaactaaatctttcatttttttacgaatttgctttgttgtaatatcaattacatataatgaacctaaattatcacctgttattaataatgtaccatcaaatgataatttcatacatgtaattttaatatctgaaacatctttatgattttcagcatgaacagttattgtatctaataattcagtatctggttttaatgtaattattttacctaatccaccaactgattcaattattttattttttggatttattttaaataatggaacgtatcgtatattaccattattcataccaatataaatagcacgcattgcaggatcacaaacaaatgaagtaattggatttgttgaaacaattgttgtaattaatttagctgatatagttaatgagtaaattctaattgttgaatctaatgatgatgaaattaatttaatatcattatttaaacctttagtaaaagttaatgaagtaatttctaatgtatgatctgttaaaattgcataaggtttttcattttcattattttcattattattcataaataatgaattaattgtataaataacaattcttgaatcttttgaaccagttgctataaatcctgaatatgttgtaatatgagttaatggttgataatgtgcttgtttgacagataagtaataaacctgaatttaatgaccaaatatataatctaccagaatttgaaccacctaataataaatcacctttcatattattatttgaatctctataaattgttaatgatgttaaaatttcaggtaatggaatgatttgttcaggtgattctttaccatatagataaacatgtaaaaccggtctctcaggtaatgcaactaataaatgagagccatgaccaattgaaacattaactgatgcatttggtgatgatggacattgtctatattgatgaacaactttagttgtgtgtaatgaagctaaataagcgaaagcagttgaatgttttttatcttgtggatttccacgtgcattatagaaaactaattcgtccattacgtgctgttgattgaatatagtatattatccaagtcttttctaataaagtatatagtagtaaaattaattcaaactgaaatttcaagataaaataaattttttttacggctaagctaaatttcactgaaaattttcatgtcgcgttaactaaagtaacaattcttgagggcactgggtactggctcatcttgaaatgcattgatctacaggcagtaaaggaagatcggctctttcgttatttaagaaacaactcatttatatataaatcatgccattagattatctgggtgctgtatttttacataaaactcatactattccctatttagatgaacttaaaacttatgttccaccattaattttagccttattactaaaactttacacaaatggatcatcaaatacttgggagaggaaattacatggtaaagtctatattgttactggtggtacaagtggaattggtgcagcattagtcaaagaattagctaaaaatggagctcaattagttttattaacatcacaagttagtgaaaatgctgatagtagtgctaaaatttggataactgattatattaatgatttacgtgaatttagtggtaatgaaatgatttatgcaggaagacttgtgatttatcatcattatattcaattagaaaatttgcaactaaatggttagatagtaaacctgcacgtagattagatggtgtaatttgtccttgcaggtgaaagtttaccaattggtaaattaagaacaaatacaattgatggagttgaaattcaaatgggcataaattatctttcacattatcatttacttaacattattagaacctgcattaagagttcaaccaccagatcgtgatgtacgtgttttattaacatcatgtgtttcacaaaatatgggagaaatcgatacaaatgatttattatggtcagatcgttcttatccatcaaataaaccatggaaagtttatggtacatcaaaattacaattaaatatgtttgcaaaggaatttcaaagaagagtttctaaaattgagagacctgataaacaaccatgtggagttagaattaatataattaatccaggtattgttagaagtccaagtacaagaagatttttatcatttggtacaatttgggggttaattttatatattttaatgtatccaatttattggttactaattaaatcatgtgaaatgggtatgcaatcatttttatttgcaattaatgcaccatcagtttatgatggacctggaggattatatattaaagaatgtagtattattaaagaagttagaaaagaattacatgatgttgaattacaaaaagttttatatgataatacggcattattaattaaggaattagagaaaacatcagcacgtaaaagggttgctgaaaaggctaaagatagaagtggtaaagataagaaaaaagtaaataaagaagatagatgctagtagtaaagtagtcagaagtatcagctaatcttgataagaatgcagtatttgcatcggcattcagtgatttaccaggttttgatccattaaagagtccattagggaccctgtaaggtaataagagtcattgaaattacctaatcaccatataaaaatttaaaaattaaaatttcagtaaggcactagtaaatttatcccgggaaaagattagcgagtgagggaatttgaaattttattgggtgatgtatatagggggtggaacaatgagagtcataagatattaacagttattattattagtcaacgattttccataatttttccactgagattgaaataaattaatgagtgtttccaaaagtttccagtttccagttttatactccgcatgaagtttaatcaactttattataatttttagtatttttttttaaattattaaatgactaaaaatttcattactgttcctttcccctttcgtaaggaatgttttcttcttatcttaaacaatcaaagattttattaaaatctgttccatctttaagaatgtcttcttctttagctccacttgatgcaacaaaattaaccataacaacaactacttctccaaaggaaaaattaccaaatgaaaaattagtttttggtcaaactttcactgatcatatgcttaaaattccattctcgtttaaaactggttgggcagcacctgaaattgttccatatggtccattagctcttgatccatcatcttgtgttttccattatgcctttgaattatttgaaggtttaaaagcttataaagataaaaatggtgatattagaatgtttagacctgataaaaatatgattagaatgaataaatctgctgatagaatttgtttaccaacttttgattcagaggaattaactaaattaattggtgaattattaaaattagataatagatttattccatcagagaaaggttattcaatgtatattagaccaaccttaattggtacatctgcaggtttaggtgttcatactcctgatgaagctcttttatttgttatttgttcacctgttggtccatattataaaacaggttttaaagctgttagattagaagcaactgattatgcaactagagcttggccaggtggtgttggtgataaaaaattaggtgcaaattatgcaccatgtgttaaacctcaattagaagctgcaaagagaggttatcaacaaaatctttggttattcggtcctgaaagaaatgttactgaagttggtacaatgaatttcttctgtgcatttaaagattctaaaactggtaaaaatgaattagttactgcaccattagatggtacaattttagaaggtgttactagagattcaattttatcattagcaagagaaagattaaatccagaagaatggacagttagtgaaagatattgtacaattgatgaaattgcagaaaaatcagaaaagggtgaattattagaagcattcggttcaggtactgcagcaattgtttcaccaattaaagaaattggttataatggtaaagatattcaagttccattattaccaggtgaacaatcaggtccattaacaaaacaattccttacttggattcaagaattacaatatggtgatgttgaaagtgattggtcaagagttttcaaaactaaatagatttagtttataattttattatttatacattatttaatataataaggttttataaatcgaaaaagctgtaaaaaatgaagtaagtaaataaaaatgatagaggcattttaaagtccaatatttttttaacattttttttttctaaccactaaaataaaataacgtcaaacgattttgattctttttttgttgagttttttttttactcacatacctttcttcttttctgtccgattctatttttctttacaactcctctttatttgtcttctcagaaaaacttttataatggaaactagaaacatcattaaacaatttatcaaacaaaatgagaaatttaaaataattaaagaaactcgtaagttaattactccaataactaatgaattaattattttagattcatcatttaatccacctcatttaggtcattattcaatgatcaaacaaagtattttagatttaaacaaaagaaataatatcaatacttcaactattaataataaatcaattttattattatttagtattgaaaatgcagataagcaaaataatttaagtattgatacttatgttcatagaattaatatgattgatttaatgacaaaatatattgatcaagaacttggattagcttgtggtattggattaattaaatcaagtttattcatagataaaagtaatttgattaatgattggttaagtgggtatacatctgaaggtaaggaaaaaatttcacaaattttcttattaggttatgatacagtgattagattattcaatatgaaatattatccaaatagtgataatataaatgaagcactgaaaccattatttgataattctaagatttgcgtgtttttacgtaaatctgataaaagtgatgaagatgagaaggaaattactaaacaaattgaatatttaaagaacttacaaaagttattgaatgatgaatctaaaattttaatctgtatgagtgaaaatgaatggaatataagttcatcatccataaggaacagtgttcagaatggaaatgatgataaatcatggaattcacaagttattcattcaattagagattacattaatagaaacggtctttatcagtgattgattacataatcacacataaaaaaatatgatagacgcgacgctgagccgtgcaatgaggtttaaccagtacaccaaggggaataatattttttcattaaagtaattctgaaatttacacatagtgaaatgtataattgtagtgtagtctcagtgtaaatgagatactggcgagggtggtattatgggaaaattctggaaaatggaaaagaggacagcagagccgccacttgaatcctctcatagtgaaaatagaaataaaatttgccctcctcgctcagctaaccctcatttcctgtttactcagccctctcatatttgattaatacttgtttataagtgttatacaataatctcttattcaatagataagacaataaatatcacattaaggtctttatctatttaaagcacttgtctgtgaatttttaactatttttgtgaattttctacaacacatttaaattcaccccttttcacacacttatttactacacatttacacacactaaaaaaaacaacagaaaaaaaagcttttttttctctctcctgaattttccgaaatttccagaaactataaaattctttgattatgtcatcaactatgaaaagaaataccgagttcaatcaacaaggtaaaaactctaatgcaaagagaaggtgtactgttaaacaaacaactgttgcaacaacaactcctccatctactccttcaacagtaaatcgtgcatatttccctgtttctaaactttgttcatataaatctaaattaactagaaatgattcatttgatttatcctcttcagataataatgacgatgatgacgatgataaggacgaagatcataacgaagagtacaactcagatgtagagcttactaatcgtacattggtaaattctaatctctattttaattcaaatagtatcaataaaactttgaaatttgctccaattgatgctaatttgtcaaaagcggtttctcaatatagtgatgaagaagttgaagatgatatcaatgataatgatgataatgatgatgatattactgatgtggaaagtaattatactgttaattctcatcgttctggttgttcaatttcatctaaaaagcaaagaagtaaatcatctaatgatattcttaatgttaattatggatcatcttatggtactttaaataataaaagatattcagttaatatcgctgatgttgttaaattggtaccttcaactgataaaaaggatggttctgaaatactgaagggcaatcaaaatataaatgttgataagaaaaatatccaacaacaacaacaataataataatagtaatatcaacaataataatattaacaataataacaataataatgaattatcaaataaaaagttcaaacacagtggtaatattccatcaagtgattttattgcaagatcacgttgctttgaatatttagttggtgcaattgatgaagcatgggctcgttattgcgattcaacgtctcatgatgaagatatcaaatatgaaaattataataattccgatgataatataaacaatactaacaataacaacaacaataataataaaaattatattgatgagacaaacaattcatttaatatgatggcaaataccccaaattcaaatacatatagttcagatgatgatgatggttataaatctggattttctgaaacaactacagttactgaatatgatagtgattataataaaatcaataatacaagaggtcgttcatttagtatgattaataacacattaattggtaattattcaaataatcaaaaagttactgaagttccagaaaatttaagattacaagaattaaagcatcgttttactaaatcaaaatattttcttgaagatttagttgattctgatttatttagtgattgtattgcattttggactaaatgggacctaattaaatattcaattattgaatttgttgaggaagatgaagaagacgaagaagatgtaattgaatctaaaattgaagagttagaagttggacgttttgtattataagattcgaaaaatgataaaaaaaaattagtaaattagaaaaaatggaaatgagttttgatcatttatagatggtattactcaattacacaaatgtatattagtaggtggggaaaaaataaatatttttaaaaatcaaaaacaaaaaaaaattcaattcatatcaaattaaattaaattatcatttcaagataaaatcatcaaatgaaaaaataaaatataaataaaatatttttttctttgaagtttattgatgaatagaaattgtataatagctttataacaaaaaaaaacaaaaattacaaaatataacataaattaccacagtaatttaattcataatagtatattgataagcaaagtctaaataaggatataaacgtataaaaactggaagaaagacaaaatttgagttaaaataaagataaaggatgaatgaattagtaaataaatgaaactgtaaacaaacttcaagacaagaccattaaacaggagttttaggtcttaattgttcaatttcatcatgatgaggtatatttgtaccaatagcattaatatcatttttatatctaactggatcaaaattatctaatataatatcaggagatgcaataacccaaccaggtctaacattaacatgtttattaataccagttgaagttggtataatatgtaatctttttgttgaagaagagaaattttcgacaactttataaatttgtgaaggtacagcagaattaccagtttgattattttccaaagataaatccgtattaacattacaatgaattaaatcattatcagaagaacgacgaactgtaccagttatacacatccaacaatgccattgaacttcttctaataattgatcttcaggtattgaccattcctttggataataaacagaatttttatcaactggtatgaaaactaattcttcacttcttctaaatttttttgaccaagttctttgatcattcattaaagttgataattcactaattttttgagttgaagcccaaatgaagaggaaaccaggttttgaacataatttatcaattggtaattgagctaataagggataaattaattgattttcagttaatgcaccaatcattataacatcaaattgtaattcataatcataaacccaagaatttaatttacttgttaaatcttgagttgaattaaatttacaaccataaggtcttgttgcatattttaaaacttgttgttcctttaatttatataatctttgtaattttggataaccttcaacttgttgctttgcattacgaatatatttatatggtaatttacctgaatgaatataattatttgtataatcatttttataacaattattccttacatttttattaacatcattattctctttattgtctttattttctctattattgttattattgttaaaattatttttaacagatatattaatttgagttggcgttgttgctataataactggaggttgattataattagctaaccccatagttggtattaatttaaaagaagctgaaagtggtgttttaatatatttaccatttttaccttgattattaccttgaccattattattattattaaccatactacttttagttggtaatcttaatgaaaaagttgtatttggagataagtaacatttacctgaagcaagtggtggagatactctctttgtacgcagttgtaattgtaaatgtaatttatcctttgtatcccaggaaacttttttcttctgcttttgtctctgtatctctgacatagtttggttgtttaatctattaagaaagacacttacaggtgaaaagacataaaaaagaggaagagccttcactataacctacttgaaatcgatgagccgccgttgtttcatcgcacatttttaaaacagcgcgaaagtgtttcagtttcagagtggtggtattgtattgtattgtattgtattgtatggtgaatagtggataggatctttgtctgatgttggtgatggacggtttggaatgtatgcattgtttgatgtcatattatttgtgtctctatttgtatttgcatttctttataatttacttaatgtcaaaatatcatttgtattacgtaatattttatttgtatctaaaattaaatcaattgattttcctaattgggaaatcatattgattttacaataattaattacattatctatgattacacacttaccagaaattaaaccgttgttctaggaacccctacaaagattgagattaaaagccttggtttatctagtaaaaagtaattatactatcttttaactgtggttagaataaaaaggaaaggcccagaacctagattgagcagaaaaaaggtagcagaaaaacagaaaaacagcaatcataggcagaaaaggtacaacagtaattttaattggttactgttgggatatcaattagtgatccaaaacagtaattaacggataatttctaaggtacacatggtttattgataaatcacttttctttttcatttccatttccttagagtattttttgtataaatagctaccatttgtactttttttcatttcaaattatttaatatcatcatacttcttattcttatattttattttaacaagtaaaaaacttccaagaacacactcttttaacaaatttattcactctttttaataaacttattcactcttttttaaaatgttattcaacttatattcaatcgttttagctttatctactttatcagcaattaaagcatcaccaattgcagatgctgaaccaaatgctgatgttcaaattctttacaaaactgttactatttgggatcatccagctgctattccaactggtattaaaattaattcagataatgatgatgactgtgatgatgatgtttcatcttcatatgcttcatcttcatattatcaatcatcatactacccatcatcatcttatttaccatcaagaatcccagtttcatcagctttaactactcttacaactgtcactagaccagctacaactgaagaagcacaagttaccactgcagcagaagttgctgaaacttcaacagaagcatcaattcaagaaacaactaccacttcaccatctactacttccgaagcaacttcagcacctacttcaaattctatctttgattcatccgttcataatggtgttgcaactttttatagtgttggagcagataattgtggtacctcatcaactgataatgattttgtttgtgcaatttcacaacaaatgtataatacagttgcaaatagtgaatcaatttcagaatattgtggtcatatgattaatttaacttataatggtaaaactattcaagttaaagttgttgattcatgtgcttcatgtgatgcaaatcatttagatttaagtcctgcagcttttaattcacttgcagatccaagtcttggtgtcattgatattcaatggacttgggcttaattttgatttaattaatcaatatttgaatcttgattttcatttattttcatacacgttcattattttataatttataagtaatttatcttacatttttttataccaatatattatataataaggttatttctgggtttcaaaatattgtacatatactttatcgatttatttatttagtaatagaaaaaaagaaaaaaatgatttaaataagttttgcaaaaacaaaaaacattcatttttttaacaacatgcaattaatttattctttaacccaattttcaacatttgaagcaggagtttcaacaccatattgttttggaacataattaattctatgaacggaattaatattttttcttaaaacaatttgataacaagttgcagaaccttgtcttgaaataatggttgaagatgcaagaaaatattcccaaattctataccatttaacaccatatttgttaacaactttttctttatttgagatccaatttttataccatttatataaagttgaagaataatgaacaccaatattatcaactgaaacagtttcaaaaccagttgcttctaatttactaataacaaaatctaatggagttgaagcatcagcacctgggaaaatatatttattcataaataaaccccaaattaaatcttcatattgccaagattttctaatacctgaatattgtaagaaaaaatatccatcatcatctaataaatcataacattgttttaaataagaaccaaaatgtctaataccaacatgttcacacatttcaacagaaacaagttttttatattttttatcaccatttgcaggtggtggagcatctctataatcacaacaaacaattcttgattgatcttgtgaaataccaaatttatttaaccaatcattaccccatttagtttgatttttacctaatgtaacaccagtaactttagcattatattgagttgaagcataagttgcaaatgcaccccaaccacaaccaatatctaaaacagtttcaccagcttgtaaattaattttttcacaaataacttttaatttattatcttgtaattgttctaatgattcttctttattaatatcactaataacaccagaagtataaaccattcttggacctaagaaccattcatagaaatcatcacctctatcataatgatctctaacttgttcctcatcttgagatcttgtatgcattataacttccgggatcatacctaaaaggaaaaatttaaataaactcatagtaaaagtaaatttaacccaatcatgtctaaattctaaaacatctaaagcatcacctttaaagctaactttattatcaaaatataattcacaaaaagtttccattgaaattttattttgacctttatataaatccttcaattatcatcatggaaatctaaataatattcaacacctttatttggtaatttaactttttcatttaatcttggagaataagttgataaaagtgtccaccatgccattaagattggaattgctaaaacaacgaagaaaaataggaaagttttaaaacctaaacctaaagatcttgtaaaataataaggaattccaatcataattgataataagatccaattattgaaatctcttgaacctggaccatctgcaggtaatggagcattatgaattgcaggagaatttgtggtttcaataccacaatcgtagttctttaaggcttccattgcttgtatataaaagaagaaactgaaaagaagagacgtgtaagtaataatgaaaacacggaaagttgtccactatttgaggaaaacgagaaacgagaccaagttccagattgctgagttttcacactgccttttattgttattattattaaatatcatctgcatataacaggatgaatagtacagatagtgggtgggatattagtgataggatcacttatttactatttgataatcaattaatcaatgaaacaattggtacacctatcctatgtgagatattgactataattttagcagttgttacaattattcattggtgcacattcatcaattattcaaccaattaatgcaattgatccaactaagagttcccaatatttccattcaagtgatattgatggtaagaaaagtgatgaaaaaattaaggaaaatcaaataacttggtcaatggttattatattaccaattatggcatcaatttcattaattagtatgtattattattctaaaaaattaaataatggttcattagaaatgtttatgaataaatatttaattataatgtcatttattcagttcaagttttgttataaattatttatttaatgcaattaatagaaatttaggattgaaatttagtattaaggggaataatttaatggatgatagattttcaattactttaagtaaggataatgaaatacatccaattggattagatgttttaaatgttacattaccagataaaacagaaagggagaaaattatcaaggaggaaagattgaaggaattaagaaatgatatattaattgatgatcaaattgttaattattatatatcatatggacaaataatttcaattataattgcaattatttttacaattatttattataaatataataataataaaaattggatacttaataatatatttggtttaatggttgtttcaatgggtatttcaaatacaagtataccaaattttcaaatttgttcaattttcctaattttattctttctatatgatatttattttgttttctttacagagataatggttaaagttgcaactgaaattgaaatacctgctaaatttataataccaaatacagtttccaaaggtgaatcattaattaaaatgtcaattttaggattaggtgatgttgcattacctggatcattaattgcattatgtttaagatttgatttatttaaatttcatcaattaaataaggataaagaatttcattatttacaaccatatgataagagatattttattaattcaattattggatatataattggattaataattactgttagatttgttaaatatactggtaatggacaacctgcattgttatatttagttccatgtttattaattagtgtttatggaactgcaatttatttaggtgatttaaaattactgtggggttataatgagataatagaagagacgaagggggcagaagatgatgaagaaggtgataaatttgagtattctgaggagaccaagatacttatcagtgatataccaccatatgatgttaaagaggataagttggataaagattacaattatgaagttgaaatagcagtagtagtgaggaagaggaaatttaaattttaaattttgaaaaaaaatattttttttatttcaatttttcacttttaactttacagtagtttttataattataaagaataagtagagtatagtagagtataatatactagacaatagacaatatgaaattagatacaacgtatatgagatatttaactcctgatgattggagggttttacaagccgttgaaaaaggatcacataatcatgaagttgtaccaactaaattaattggacaaattgccaatttaaagagtggtattggtaataccaacaaagcaattagtgatttagctaaaattaatttaatttcacgtttaagaaatgcaagttatgatggatatagaattacatataatggatttgattatgttgcattgaaaacaattcatcaacatggtaatattgaagaattagaacatacaattggagttggtaaagagagtgatatttatagttgtaaaaccaagaatggagaagaaagagttttaaaaattcatagattaggtagaattagtttccgtacagttagaaataagagagattatttaaaaattggtaaaggtggatcatggatgtttttatcaacattagcagctcaaagggaatatgaatttatgagtattttatataggaatgaatttgaagtaccaataccatttgatgtttcaagacatttaattttaatggaaagaattaaaggattcccaatgacacaattatatgaattaaaagatattggtaaattatataatggattaatgaaatttgctgttaaattagcaaataatggattaattcattgtgattataatgaatataatattatgattattaataaagaagagagtggaaaggatgataaagatagagattttgttgtaattgatttcccacaatgtattagtattgaacatccagatgcaaaggaatattttaaaagagatattgaatgtattaagaaatttttcaaacgtagatttggatataaaccaatgaaaattgatgaaatgatgttagatgatgaaggatttggtaaaggatataaatatggatggccaatatttgaaagggatattaaaagaattaatgatttagatgttcaagttaaagcatcaggatatagacgtaaattaggagatgaagagagacaattacaagcagttgttggacaacaaggagatgatagtgatggagaggatgaaggtgaaagtgattatagtgatagtgatgatggtgattatgatagtgattatagtgattatagtgaagataatggaataaatgaagaagaagaagagaatgaaagaattattgaagctataagtagtggagttggtaatttaaagatggatgcattgggtaattatatattagaagaaggtagtgaagaagaagaagaaggagaagaagaagaagaagataagtaatttatgtactttataaactataaacagtaatttttaagattaggatactattacataacatgatgatgataatggttatcactggaccgtcgtatagaaatacgagtcaaaaatgtatgacaaggtgatattagatgtgtcattcaataagtaattactacaagatatacatgagagtaatatagatatatatatacagatatacaattatatagtcatcaattatatcgggagattcattaggaatcaatccgtataggcatgactaaagtaaagtttaagataagctcagagtagtgtcatatgattttgcattacgtcggggagatactagtaaggtttgaaacgtcatgaaagcatgtgtatataaatactccctactcctccattagtagttatctatttaagtgataaaataaacaaaacctataagcaattatagtcaaatttatttcattaataactgctaattaaagaatatagaaatagattatattattattatgattacgtaacacacaagtcacgtgaccagaataaagactctgcttcccctcactcttaacaccgttgaagaccctgaaaattcctctctgttagccaataagagctcttgaaatgaaaagagggggtgtggaaaaaatacatgtattatggggtatagtatatagggggtgtaaattgatttatttaacagtttaacagtctattttgatgagatgagtttataatatgatataatataatataatatattatattataaatataccttgtaaatataccttgtaattatctacctacttttatcttctattactcaatgtatgtgtagtagtatagtaatctaatcactttatatattagtattatttactatcaaagttaatatttaatttattatttcatatttacttattgttgaacgtttttattttttaatcttttcatcgttttattgttgtatattactcataacccgctttatatcttcatattttagggagtataaaaactaattaattccccacttgttatattatatctttatttttcattatcttcttatcttattatcttacctattttaagcttctttaatgtaattttatcttaaattttatatctcttccttaactaaacaaaaacaatgttctcatcaacatttaaaagacaattaacttaaatcaattagatttcaatcaacttttacaattccaaaaactcaaatgggtgtcatttttgaaactcatggtggtccattacattataaagaaattcctgttccaattccaaaatcaactgaaattttaattaatgttaaatattctggtgtttgtcatactgatttacatgcttggaaaggtgattggcctttacctgctaaattacccttagttggatggtcatgaaggtgcaggtattgttgttgcaaaaggttcagctgttaaaaattttgaaattggtgatttagctggtattaaatggttaaatggttcttgtatgtcatgtgaattttgtgaacaaggtgatgaatcaaattgtgaacatgctgatttatcaggttatacacatgatggttcatttcaacaatatgctactgcagatgcaattcaagctgctaaaattccaaatggtactgatttagctcaagttgcaccaattttatgtgcaggtgttactgtttataaagctttaaaaactgctgatttaagagcaggtcaatgggttgcaatttcaggtgctgcaggtgggttaggttcattagctgttcaatatgccaaagcaatgggtttaagagttttaggtattgatggtggtgaaggtaaaaaggaattatttacaaaatgtggtggtgatgttttcattgattttactaaatattcaagagatgaaaatggaaatgaaaatatgattaatgatattaaaattgcaacaaatggtttaggtccacatggtgttattaatgtttcagtttctgaatctgcaatttcacaatcatgttcatatgttagatcaactggtaaagttgttttagttggtatgccaagtggtgcaatttgtaaatctgatgttttccaacatgttgttaaatcattacaaattaaaggttcatatgttggtaatagagctgatacaagagaagcattagaatttttcaatgatggtaaagttaaatcaccaattaaagttgttggattatctaaattacctgaaatttatgaattaatggaacaaggtaaaattttaggtagatatgttgttgatacagcttattaaagaatgtaattattgtatttagattagattagatatagttagataattagataattacttagtcttacgtaaatacttcgtctttatcgataacactcttcttcctatctccaagacacacacagactacactccactacgatgtctacatgggatcagaaaacattttcattctctccaagagcaagaggttgttatttagtaactgatgaaatttacaataatttaccatttattaaagattataaaattggtacattaaatttattccttaaacatacatcatgtgcaatttcacttaatgaaaattgtgatcctgatgtacgtattgatatgtcaactgcattaaataatgtagttcctgatgataatggagaaattttcaatcatattgatgaaggtagtgatgatatgtcaggacatgcaaaatcttcaattgttggagtttcaattacaattccaataactaatggtaaattagccttgggtacatggcaaggtgtttacctaatggagtttcgtaattacagacatacaagatactgtgttgcaactgttcaaggtattaaataaagtcttctattagtatataacttacgtaaataaatttttcactttataacattcaatatacttcttttgataatgttacgtagatatattggtaagatggttaatagtaatagtaacatacagaatgagaaacaaatgtcttataatgatggagtatcagttatgaaaactgcatcagggttaattaaacaacgtaaaggtcaaagtgaagatgaatatttaaatgaaaaattatcattttggtcaaatggacctgtaattcaaaatcatacctatgtaactgattatatgaaagaatatttgaataaagaaactacatcttcattcacggaaataccaaagattgaaagagagactgtattacatggtttagagagattatatttccaaagagattatgaaaattgtttaaatgatgttaataaaatacttgaagagattaaattaaacaatccaaatctaaatcaagagattgatcttaagaaaaataagaatattaaaagagtttataatcaacttgttttactatcaaatagatgtatatctaaacttcaagatgaaaacattaaatcacttgaatcacaaaaactttactaaatatatataatactatacattacattaattaacataaattctaatttcaacaccaccaacatttctcttctgtaaatcactatcatcatcctcctcttcttcctcttcctcttcttcttcctttacaaactcatctaaaacaccaacactctttgtaaagaaatcaacattaaatttttcatcaaatttaaacttcataccaatattaattactttactaatagctttacccatacctttaactgtaatataattacaattcatatcaatattaccacgtcgtattaaattacctctcttattcggtatattttcaaaattaattaacattttttcaattctcttaacagctgaaataaatggtgtcttggattgaatataaacagttgtatctaattcattatgtctgtagggacgtaatggtgcatgtttgataagtcttttaccattgattatcctattagattctttcattgtcttaatatataaataaagaagaagttaggagtatgatatatataatacatagcgaggaaaattcatagtgtatacatgttgattctatgatgataccactttcttttgggataatgacggttttaatgaagaatgatgataagttaattgaatatgcattgggatcacaggaatatattgatcaatttattccaattattaaaactgaattattaaataatgattcacttgataaattaattgataaattacaattattaaatgatgataaagaattagaacttcaagatatatcatttaattcaattgataatataactaaatcaattgaaataattaacaatattgttaaatcatctgatcaaattaataatcaattagttataacaagtaaaaatataagtaaatcaggtaaaaatttattagaagagagaaagaaaatattaaatattaatcaaataaaggatagaattaatgatattaatattaaaattgatttatgtttagatgttcttaatacaactaataaaatattagaattggttaaaagtaaagatttttatagatcattaattttacttaaatcattaaataataataataatttaaatgaattgaaaaattttgaatttattaataaattttataatgcaataccatcatttgaattattaattattgatgaaacttttaatcaattaaatagatggttaaatttaaatattgaaaaaaattttacagaatttggtgaattattatttgaaaatttccaattaattaatgattcatggtttgaaattcaaattaataataaatcattattaaattataaagttaattcatccgttgaaaaatcttttagaattgatgaattaagaacttttaaccccttggataaattaaatattaatttacaacctttattacattcaattttagttttcaaagaattaaatcaattaaaaattttaaaagattatttatctaatgatataattagaagaattgatcatttatttataccaattaaagattcaattacaaaattaaatgttttcccaagtaatgaatcattgaaattaaatatttattcaattatatcatttacaattattgataaattaattaatgaaaaaattaattatcaattaagatcaattgatgaaattaatgaaacttttaatttaattttaaaaaaattttcaccaattttaaataatcatattgaattttatagttttgaaattgatgaattaattgaaattaatgaaattattggtatttattatcaaatacttttatccaataatttcttaaattgtcaaataatttatgaaaaattaatgattatatttgataaatatttaaataaattagtggaaaaatttaaaaaagattatattaaaatatcaatgaatgataatttacaaccaattattatttcaactgaggatgaatttaatcaattagagaaagatacattttatttaggtgatataagtaacaataataacattaaaaatttcccattaacaataccaatttcatcaagttatttgaaaacaaataaattattaaatcaatttattaatgatatttatgaatttatatcaaaatattatattcatgataataatttaattattaataaaatttctaaaagtattgattatattttaactaaaattatattaattgatttagatgataaaataaaatcaacatataaagaagttgtttcacaaaatttaattaatttagattattatttaatatcaattgaaaaaattgaaaattatttaaattcaagtgaagataatttaaatattttaagatttagaaattttacaaatttaattaaatttcaatcaattaatgaatttaaacgtagtaggaaatctgcaattgaaagtatgtttaatatgattgatttaaaaattttttcattatttgatatggttgaatttaattggaatagtaatgaatttaataatcaaccaaatacaaatttaattgatttaattggatttttacttgattcatttaaattaaatttttcacatttaccaattagtattaaatcattattattattaaagattttcgataaaattagtaaatttttaatgattcaattaatgaaagttataaaattactgaacaattcaattaaaaattttaaaattgatgttgaatatgttcaaaattccattaatttattctttgaaaatgaaaataatgttaatattgaaccattgaaaaatttatttaataaattaaatcaaataactgatttattaattgatggtaatttagaatattataaaaatgatgaaattagaattagaaaatttaataagattgaaccagaggaagcaatttatttattaaataaacttaaagacgatgaaaataataatgaaattgaacaacaagaggaaagtatagatggcaatgatgatgatgatgatactatatcaatttttggattgaaaagatctacaactttctttaaaaagagttaatgactatatacgaatattatataaacttttctttagataataacttagattcgaatggtaaccaatcactctgtttattaggtatcaaccccattgaatttaatttccaaataccaattataagattaatcaaacaagataataaataaactaatttcattaaaattaaatcatattcatcaacttcaccatcgattgaatcatttaagttattgaatttcccattaattaacataatttctttaaaagtattaatgaataacattgctaacatcataattggtataatttgtacatcattaggtgacatataattcattacaatattcattaaaattgaactataatttgatcttgcaattgtccataattgtgttttcttattattatttaattcagcattgtatatcttacctgatgatttagttgatggtgtgcttgtacctgtaacatacgtcgttgattcgctatatcctttaggtgttataatttccttattattggtattgttcaagcatttatcaacaagtgaatcttcttcgtcataggggaacattgttagtataaagagagagtgtgtgtgattatgaatagaataatagttattgggaaaagaacagttgataaagttaagtttattaataatgtatttcaattccaagacgacgacgagcaattagaatcaggttcacaatctggtgttgttttagatagagaattgtctacgaaatactataatataccaatacaggtgtttattgatgaatgtgatgatattagagtatggattaatgagttaatggatcttgaaatgagagaattacgtgatgaattacaggcaatagttatactagacattgatgcagataatgaatatgaagatgaaattgataaattgtatgatttattaagtaaggaacatttagagaagactaatcatgatgatattccaatgggatggagaagttatagttatcaatggtgtagataatgacaatataagggaatgtcaatcaatgattaatggtattgtatggcgtgagagagaaccactaagtgatacattggataaagatactacaattgatacaatagtgaatcaaataactacactcaagtcccaacaccgttcaatgacgacagatgaggtacatcaacacgtcaccagtgtcgttgatcagctactgaagcaataagaggtgtatatatagctataacaagtcccttaatgagaattaaattttctactttctcttattagatgtttctttccaatcaataaaatgtttcaaagaagactattacatacaattaaatacgctaaacaacctcaattataccttcatgaatcaataacttttacaaaagtttcattctctaaagatccaaataaaattcatattggtgaagtaccttcaagttcagatttatccaaattgaatattgaaccatcaaaatttaatggaaaattcaaaatttaaagatattttacataaaacaatttctaaaaatatttatgatgatcaatcatatgtaattgaagcaattaattatagaggttcatttatgccaattggtgatgaaaaagttattcaagaatatatgaatcaaagacctgaattaccaaatacaatgggatttgttcatgttgataatgatggtataatggaaaaaggtacttatgaagtaaatgatacatatacactgtgtaatgttgatggtataattaaattacctgaaacgatgttagaacatttacttaaatctttataatagaatgataataatgacactatacatattttatataatcttccagaatattaattaataatgaacctttatcattccaatcaattacaatatcttgtaaattactatcacaattcataattaacatatctaaaaatgagaaaaatggtaattcattttgttcattaagtgcaataattattgcataaattaatttatttttattaccattaaagaattcattaaattttggacatttattataatcatcataagagaaaataattgaaacttgttcaatataattttgacattcatcctctttaaacatttcactaatttgatttatccttttaatacattcattaatttccatacctgtaatcatttcataaattaatgaaacaattcttaatctaaaattaattttcctatatgttataaagaatgaattatattgacattctaataattttttaacttcattaaatttatttaattgtatcatttctctaatttgctttttcaaataacataatccttcaggttctttcaatgtacttatcacaattgattctctatttaatttttgcatatcattttccattccttttaaagtatttaaataacctccatattttcaaatattctaaaactaatgaatcagtatatttaatcatatcaatattattattatttttaattataacatctttacttacattaaaaggttcaaattcaaatttattaattatatcttcctgtaattgaaatttattgaatttaacataattttcaatatcaaattcaaattctttatctttaccattaattccaaaattaatttcaacattacaccatgaacctaaactaattattggtattaaacctttaatattttttttaccttcaaaacttttctcaaaccatttatcaattgaaccaatttctttaattaataaaccatttttagttaaaaatattaaatctttaaataaattataaccaattccgattatatcatttttaccaaatttacaaatttcacaatttttcttatttggatcccaaattgtaaaattacctgttttaccattccaaccaacaattctatcatcattacctctcatatcaatcattgtatttaaatgatgaattagtattattattggtattatgatgatgattacgattaatatttttaatttcatcctttaaaaatcctataactaaatcaattccattatctttaccatcaattatctttaattcataataataaatacaaactaatggtgaaacaattgaattaaaatggtacagtaagatatccagatttttcattatttaagtctaggataaatattaaaactaggattatctaataattttgttgaaattgtatttaattcataatcaatattaaaatctaaatcacttttaattttatcaaatttataaggtattgataaatttttaaaactttcatgatcattatctttattatcatcaataacttcatcaatgttaagatttaataaattatttaaatattgattatttttaatatcatttgaatttttaagaaatttacatggatttttacctaaataaccattagttgataattgtaaaattttacgccatcgaattgtatcaggcagtatatgttgattatttctcttaatttcatcctctagatgattgttgatgtattgaaatgataaatatgtgggtattgtattcatcctatgatgttttgtccaaaagaaaaaggactcatcggagtagaaagataatatacaatagatagcgatatattgatactacaaatttactaaatttttgacccgttgaggaggatttttaacctcgtcgtattaaattaatatacaatgatttcatttatgtaattgagttaatgcagttgatgcagtttaactttaatgatataaagagagtatcaataagatacatctagtatctgtaatgatctggtttgtaaggaccttgttctggaattgctaaatattcagattgaacatttgataatttagttaatttaacacctaaatgatctaaatgacatcttgcaacagtttcatctaaaatttttggtaagatatgaacaccaacattgaaaggaccagttttttcaaattctgggtaagtagttctaaatttttcatcatttgccttaaataaagcaatttgagctaaaacttgatttgagaatgaacatgacataacgaatgatgaatgaccagttgcgcaaccaaggttaactaatctaccatcagctaaaagaattaaatgtttaccagatttcattaaaaatctatcaacttgaggtttaatattaatacattcaactgcattatcctttaaccaagcaacatcaatttcgaatatcaaaatgaccaatattacaaacaattgcatcttctggcatttgttcaaaatgtttaccagtaataatatctctacaaccagtagttgtaacgaaaatttgaccaattttagcaacatcatccattgtatcaacttgataaccttcaactgctgcttgtaatgcattaattggatcaacttcagtaacaataactcttgcacccatacctcttaaagccattgcacaacctttaccaacatcaccaaaacctgcaacaactgcaactttacctgcaatcataacatcagttgctcttttaataccatcaattaaagattctctacaaccatataaattatcaaatttagatttagtaactgaatcattaacattaatagctgggatttttaaagttgcatctttaaccattttatataaattatgaacaccagtagtagtttcttcacttaaaccgaaacaatcatttaacatttcaggatatttttcatgaacaattttagttaaatcaccaccatcatcaagaattaaatttaatttagcattatccttgaaaggcaaataattgttgttcaatacaccattcatattcttcttcagtttcacctttccaagcgaaaactggaacaccagcagcagcaattgcagcagctgcatgatcttgagttgaataaatattacaagaagaccaagtaacttcagcacctaatgtaactaaagtttcaataagaacagcagtttgaatagtcatatgtaaacaacctgcaattctagcaccttttaatggttgagaaggaccatatttctttctaatatacattaaacctggcatttcattttcagataattggatatcttttctaccgaaagcggcaagatgagatatcagcgactttgtaagtagttgaaggagcagatgacattgttacctaaatgaaagacagaataatagaagctaaaataaaagaaaagccaaaaagaaaataaaacataaaaaaaagtggaaaacctaaggcttttataaaagtctctctatacatgtgaaaaaaaaatttttcattaattcattaattcattaattactaccatgtgaattattagctattttattactatacgagttatacgagtaagtttattattattattatctatctgttacagacgcatcgactgtatgggtgggttataaagactatactatactatcctctactaatcctgcactgaaccatcccttggtctataactaataccttgagcatttaaatcattccttatatcatcaggtaatttaccaacaattctaactgcataaaatcctgaaacaaaattttcaattcttaaccaacgacttacccatgattttgaactaccattcattgcaactaatccttcaaatgttggtgatgtacattcccttataacatcttcattatcttgataatgtaaaactgattcacaatttggacatccttcatttctaaattgtgtcatactttgaacaactccacataaaaggcatgctctatttaatttcggggtggtacgtgttctcttttgtccaactgatgacatattattatgtttgtttgatatgatctatatgattatatgatctatatgataacacatatgactataataaagatataatgatacaactcatacagtcattatacccttagtaacactctcgcatgaaatgaaattttcaaatcttcaacatgtaattttcaatatgcacttcctattacggtaattccaattattcatttctatcacactttctttaatctttattaatcaaccatacaatatacaatgtttaatacattgaaaagatcgaatcctctaagactaactctaataacatcacccatattaagaaaacccctttctttatcacctcgtcgacatttttcatttcaaccaataattgaatcacttgatcatgcatctgaaatgcttatacaaattcatgctgattcaactctaccttggtatattttcataccattaatgactttcacatttacgttcatttataacatttaccaatatcactttatcaaagaaaaaaattacgtaaacaaaatgaattaagaccaattattcaagcaacgactcctgttttacgtgcaaaattagcttcaattgcacaaattgaaaaatttaaaaatccaaattcaaaatctccaattgctcaattaactgctgataaaattataatattatctgcaaaggaaagaattaaaagacaaagaaatttattcaggaaaattcaatgtcaaacttggaaaatgtggttattacctgcaatccaattacctttatggatttcaatatcttatatgtttagaaaaataactggatggtcagatatgaatcattctaatatcgattcttctttaattaatgaacatttcctatatttaacagatttatcattaaatgatccttattttattttaccaattacattaggtataatttcattatcaaatgctgaatggaattttaaaactgctcatttaatgaatttaacttcaaaaggtattaaaaataatttaagatcaactccatttgatgttattataactttatcaagatcttcacttattttccttactgcaatttcaactcaagctccagctgctttagttatttattggatttcttcaaatttttattcattaattcaaaatattttacttgataaatatttacctctcaagtatactccttataatagatctgattaaatttacttgtatatatacctctctatattaaacttactatacatactaaagtgctttaaatttacccagtttataacttttaaaatatttacctaatttatcatcatttaatagtattccaaatacatgtttactacatcctttacaatattcggggataaattgatctccatattcattagaatacacacaacaccatcttacaccacttttgtcgaccataacattagtaataactccatatgatgtatttgtacaaagaattctgccaatgaattctctactaaaatcttccatataaccaaattctaacatattttcaaaaagactgttacatttatccattgaaaataatctttttaatgggagtgtaaacccattgccaaattcttcaattacatcctcaaataaacatctattgaataaattgattgtatggggtaataattctttctcatacactaattttattatatttgaaattaatttcttatcaatatctttaccaacaaatgataattgtgaatgtattctaccatgattatatgcaatcatatgtttatatttcactgaatagttgattttactagttcttaccttatttcttttattcaatgatgcagatgaatgaaaaatattttctaatctagcaacatcaaaaccattttctcctttaagttcaataattgaatggcttatccttttctataaacaaatcacattttaatttattatcccttccaaataatctataaatttttctatcttcattttcaattaacatataattacaatataaagaaatataatcaccaagaccaacaagtaagcatattttactaatagttaacaatattaatgggaaccgattgtcgaaatctcccatatataatcttgatagtaaccaaacattatcttgggagtaatttgtatatgaatcatcagatttgaaaaatcctgatcgtttgtagaatttctctaataatatgtcactaattgtaattactttattggcatttgatccataagtattatcaaattcaattgaattataacgattgattgtttcatttattatcttatctcgtattaataaactatcataaaataatggatcacataatgaaagtagtaaataatatggttcataatctttaggtctatccaaatgacgagtttttttgctttaagaaacttataaaatttccttgaattataggcttcaattatctttgatgcaatataaatacgacgtaaattatttgatctttcatttatatatgaatcaaattgcttttgtgtaactaccaatcttccattaatttctttaaaatcttcagacttaaaatgtcttacctctttcattaattgtggtaaataaaatctaaaattcttataaataccttcaagtttcaattgaacagaatttaatttattttcatttaaatcaaaaatgtaatcaattactttaattacatggtaatcattaaacttcagctttctatataattggtaatatgaaccaaatttttcatattcatttgagtcatcatatgtcagtgtttcaaaattgtaaaatgttaaaaaccaatttcgtttaattgtatctttccaaattatatcagatttaagagattccattcttttggaagttttaatcaaatttaataaatcattatcatctaaacacacactaattttcttccatatctctataggtaattcatccagcattagctcattatcaaaagaaatgatattgctatgaagttttcttttttgtgccgactcttgtcagtattgagattgaaggctcatttttcttagccttacagtaatacctttttaaaagaatgattacgtaagatatttatatgtacattaatgctcaaagtggtagtcattcaagttattcccttcctaaggaatgtgaccttgatattgtactcaggtgttacaactgtgcctattattattcagtttcaacatagaaaattgtagtttaaaaacaaagtatttaagaaaaactaacaaaaaataagattcaatagtacattttaacattgactaattcaataatcggagtgacaaaattctattaattaatctatctttatcaatgcaaatattgatgcagttaaatatacacttagtagtaattacttaagtgcttcaaatttcccattatcaaaacttttaaaatatttacctaaattatcatcacataaaagtgcattaacaaaaggtctagtatctaatatatatgatcatttaattcaacatgctcctctctgataaattcttcgccaaaatcactagaataaatacaataccatatctcatctttatttgacttaataatatcaataacaactccattttttcctgttaaattaatatattttcctataaatgatttattatgaatttcatcaatatctcttttattcaactcaagacgtcttccaccaaaattatcctttttaaataaatcgtatatagggaagaatacttcaaatgaaccgtcttttaattcatctttaaataaacatctattgtataatgtaataaaatctggtcctaatttatattcataaacaaattctagtatactataaaacatttttgagttaatgttattaccaattaatgataattgtgaagataaattacatatagtttgacttatcatatgtccatgtctcggtgaatctctaatttgatttgctttatactttctcatatattcaaaccatgcagatgatataaaactactatcatagtcatgaacatccccattttttccattcaatgtgtaagttgaattagaattttcactattattatcatgattatcatcggattcttcttgaaaatttccacttttaacgcatcagattttttgaataatctataaatattcttattcttattctcaattaacatataattaaaatctaatgaaacaaattgacctaaacctacaagtgaacatacttttcttattattaagaataatagtggatatgattgttcataatcacccatatataatcttgataataaccaaaaatcttcaggaagtttcagtttcattttctccatttaaatttttaattattcctgattgtttgttcaaattctttattagtatttcactaattttgaaaactttattaacatttgatttatgatcattctcaaaattacctaagttatattcagaaattgtttcattgataattttatgtcttattaataaactatcataaaataatggatcacagaatgaaaacttgtaaataaaatgtttcataatcttttggtctttcattatcagctatcatttcaaatgttttgagaaactcataaaacttcttcaaattaaatgattcaattatctttgaagcaatgtaaattctacgtaaattttttgatctttcatttatgtgtgcatcaaattgtttttgtgtaaattgccaatcttccattgatttcattataatcatctggtttcaaatgacgtagcttctctcattaattgtggtaaataatatttaaaattcttataagtaccttgcaagttttaattgagcagaatttaaattattttcatttaaatcaaccatataatcaattactttaattaaatgtaaatcatcaaattttaactttctaaataattggtaatatgaaccatatttttcatattcatttaaatcattataagtcaatgattgaaaatcataaaatgataaaaaccaattttgtttaacaacatctttccagataatatccgatttaaggaattccattcttttggacgtttggattaaattgaataaatccttaccgtctagatatccactaatctttttccatatttctataggtaattcattcaacattagttgattatcaaaagaaaaatagatactgatatacacttatccttgtgggtcacattaagacggagtaaaatcattaaaaaagtacaaatgtcattacgtaagatattcatgtgggaaatcatttactacttccattcctatgttaatctagtactgttgaaactatatacactctttttaaacaactgacactaactggttatagttatataatgctagcaacgtgtaataaccaaacatttaatgaattagaacacaataatatttcagtgctcccagtagtttatgggcattccgcagtagcttttttctcaactgccggtaataattctcaactcccagtagttctttttctggtattatctctacaaccaaaatgtcttaaacttgaaggatattatatattcattgatgtaattattagagcacttaaatataaacttattatgatactaaagtgcttcgaacttcccattatcaaaacttttaaaatatttacctagtttatcatcacataaaagtgcattcacaaatggcttaatatataataattcatccttatcaacatgctcctctctgataaattcttcaccaaaattactagaataaatacaataccatatcttatcatcattggacctcattacattaataatagctccatgacttccccttgaatcgataaattttccaataagtgatttattattgatttcaacaaaacttttttctttcatctgatcacttatcacactattattttccttttttaataaatcatatatagggaagaatatttcaaatgaaattccttttatttcatccttaaataaacatctattataaaatgtaataaaatcatgtcctaatttattttcataaacaaattctaatatactataaaacatttttgaattgatattattaccaataaatgataattgtgaagatgaattacacataatttgatttatcatatgtccatgtctctgtgaatctctaatttgatatactttataccttctcctatattccatccatgcagatgatatgaaaatactttcatattcatatacatccccattttctccacttaaaatgcaatctgaactagaattttcataattattaaaattattatcattaccatttgtttgtaaaacttttactgttaattcatcctcttttttgaaaaacttatagattgtcttattgtcattcccaattaatatataattgaaatataatgaaacatattgatctaaacctacaagtgaacatattttctttattgtcaaaaataataatggataaggatattcataatcgcccatatataatcttgataataaccaaacatcttcaggagtattaacatcttgttcaatatagtctgtaatgaatccgtcttgtttttctaatttatttatcaatattttactaattttaaatactttcttaacatttgatccatgactagtttcaaaatcaattgaaatgtattcattgatcgtttcatttattatcttatctcgtattaataaactatcataaaataacggatcacaaagggaaaattgtaaataaaatgtctcgtaatcctttggtctttcactatcagtcattatttcaaatgttttaagaaactcataaaatttccttgagttataggctttgattatttgtgatgcaatataaatcctgcgtaaatttgttgatctttctttggtatatgcgtcaaattgtttttgtgtaattgccaatcttccattgatttcattataatcatctggtttcaaatggcgtagttctctcattaattgtggtaaacaatatttgaacttcttataaataccttcaagttttaattgaacagaatttagtttactttcattcaaatcaaacatatattcaattactttgatcacgtggtgatcatcaaactttaactttctgaataattggtaatatgaaccaattttttcatattcctgtgaatcattataagtcaatgattgaaaatcataaaatgttaaaaaccaattttgtttaacaatgtctttccaaataatatcagatttcaaaaattccatccttttggaagttttcattaaattcagtatatcatcactatctaaatatccactgattttcttccatatttctataggtaattcatccaacattagttgatgatatcaaaagaagtgcacttattatttaagatcttcttctttgtgggggcccaattggtgaaataaaaggttaaaaaaatggccatctcattacgtaagatgtttatgctgacattcttaatgtaagacgtcgttctcaataagtcagtgattcagtaactacacttctcagtaactacacttctcatgctatttctaccgttgttaaagctattatgtactcacttttttggatacaaataacggttcttttatgaaataaacctatgtattgtaattctcttcgaagtatgtgttaaatgaatacaaagtcttggaaattacgtaattttatcttcagttgctatatgtgctttacaacgctgatccttaacttggtgttacaactgtacctgttatgacattcaatttctacagtgacataagcggtttgagctcaaatcatttaagagaaaccaagaaaatgtaggactcaagaataaactgtaacatcatccaattctattatcggattgacatgctaagcttgattaatctttctgtaaaacaagattttagtttccattgagagtaatatgtgaacaaaatatacacaaaagcctataaaagagcttatcattattaagattattaacaataaaacacctcaaaatcaaaactgagtcgcttccgtagatttcaattacaatgatatacaatttggaactacacaaacataaagttgagccccctaatgtaaacaaatgatgcatgtaagcaaaaaaattacaattttgactgtttctaacaacattctctggtattaactctatggccaaaaaatcttaatttttgagagttctagtctgtgtagtatcatcaagggttaagaataattaagaacaagggaaaggattaaggcctatgaacttacctgactcataacttctaacatatttacctattgaatcatcacttaataatgtttccaacacaggtatgttatctcttgagctaataacatcctcatcatagatatatctttctccaagctcattagaataaacacaatacccaagttcatcccaccttgaactcataacattagtaacaactccatatgatagatttgtactaataattgtaccaattaatggtgaagtgaaatcatctaaatatccaagtagtaacttatgtgaacttagatcactatgtacctcaagtcggtataaggaacttaatccaaatgcatcttcataggatttttcctctatttcagtcttaaataaacatttattaaataaattaattgtaggggttaataatactttttcatacactatttttgttatatttgaaattagcttcatatcaatatctttaccaacaaatgataattgtaaatgaattctaccatgattatttgtaatcatatgttcatattccactgaattattaatcttacttatcctatccgtatttatattatccgttaatgcatatgaaaagaaaatatcttcatattcatgaacttttggactatttttaccactccactttttaattaaatgattattttctacattggcaagccttctaaatattactatcccaaatctattcttttttctaattagtccataaatattcttattttcattttggaccccaatgaaattagaatttagtgaaatacattcattaattccaacaagtgaacatattttaccaatagacaagtatattaatgggaatggatcatcgaaatctcccatatataatcttgataacaaccaaacactatttcctgaatgatttgtatatgattcatcaaccttaataaaccctgattgttttttcaaattctttaataatattttaccgattgtatatactttactaatatttgatccataattatttcaaaatcagttgacttatattcatttattgtttcatttattatcttatctcgtattaacaaactatcataaaataatggatcacaatatgaaaattgtaaatagaatgtctcataatctgttggtctttcactatcagagaatacttcataaaatctaagaaactcaaaaaattttcttgaattaattgatttaattatctttgatgcaatataaatcctacgtaaattttttgatctttctttggtgtatgcttcaaactggctctgagttattgctaaccttccattgatttctttaaaatattcagcttttaaatgtcttgattctctcattaattgtggtaaataatatttgaactttttataaataccttcaaggtttgattgtgtagaatctaatttatcacgattcaaatcatccatatgatcaattactttaatcacatgataatcataaaattttaattttccaaaaattgataatatgaaccacattttttatattcatctgtatcatcatatattaaaaattcgaaatcataaaatgttagaaaccaattttgtttaacaatatctttccagataatatcagatttaaggaattccatctttttggaagttttaataaggtttaataaatcattatcttccaaatgctcactaatatccttccatatttctataggtaattcatccaacatcggttgattaataaaagcaagttactgataacaatacctctttttgtggggtctcatcgatgaaataaaaggttaagaaaatatgagatgccattacgtaagcttaagggattatgatgtatgataaggtatttattaaaacattaatagaaagcactgaagaattagagaacgtaaagtaaataaataggtaaatatatgtaagagacaaacttcaacgtattggttttaatatttcatcatataacattttctttaattgtaagatatccaattgatctttctttttatcaaaatcaaagaaatcatttggtaattcatttgcaattggttcatcatttggatcatgataaaatgcaacataaggatgatttaatgcatctataacagttattctattttttggattaaaagttaataatttttctaataaatcagttgcttgaggatttgcatttggtaataatttactaaagggtattttatcagattttggtatcattttaatatattcttgagctcttcttgatttaattgaattaaaatcttccaaattcggggtacctaaaatatcaattattaattttaattgattatgataatcagaacctgggaataaaggtttacttgataacatttcaaataatatacaaccaactgaccaaacatcaattgcagttgtatattcttggaaagttaacataatttcaggagctctataccatctagttgcaacatattcagtcatgaaaccaaaattatcatcagttgaagcaacagatctagctaaaccaaaatcacaaatttttaaatcacaatttgaatttaataataaatttgaaggttttaaatctctatgtaaaacatttgcagaatgtaaagcttttaaagctcttaaagtttgataaataaaatattgacaatgattatcacttaatttttgagttttaattattctatgtaaatcagtttccattaattcttgaataaggtaaacttcattaaaactttcaaaattataaggtatttgaatatctaaaataccaattatattttcatgattaaaatgttttaataattttaattctcttaaagttctaagacaaaataaagttctttcaaagggttgaattttctttattgcaactttttgctttgttggtttataaattgcagaacaaacaattccataggcaccttcaccaacaatttctttgatttgataataatcactaacattaaaagttacttgagtttgaggtaatggcattgtaattgtaattgtgatttattatttattattaactatatataagggttatgtactatattttaaatgacattaacttgtcgtttaatcataaaataagataacagataaagattataataaacgatcttaataccaatttacatcatcaatttgatcattatcaacaatataataataacgcgttaccagtataatacttaataataacaataaggaaataaatctattaatagatcactatattacttacgtaacacacacgtgaccactaagagggtttcaattagaaaaagaaaaaccctcactcaaatttaattttttcaatctgaaaaaaaaaaattttgaatttttcacttgttgaatactggtgatagtgatattactgattattattgattattattgatgatgttttattacattttctttaactatttaccttattttgtttattttcccttccttttatcaactcgcatataatggttaacgttgcaatcaacaaaaagagaaagcttgtcgctgatggtgtcttttacgctgaattaaatgaattcttcactagagaattagctgaagaaggttatgcaggttgtgaagttaagattactccaaccaaaactgatgttattatcaaggcaactagaactaatgatgttttaggtgaaaaaggtagaagaatcagagaattaactatgttaattcaaaaaagatttggtttagctccacaatcaattgctttatatgctgaaagagttcaaaacagaggtttatcagcttcaactcaatgtgaatcattaaaattcaaattattaaatggtttagctgttagaagagctgcttatggtgttattagaaatgttatggaatctggtgcaaaaggtattgaagttgttatttcaggtaaatctaagggtgctagagcaagagcaattaaatttggtcaaggttttatgattcattctggtcaacctgttaatgatttcattgaagttgcaactagacatgttcttttaagacaaggtgtccttggtttaaaggttaaaattatgaaagatccagctcaaaacaaaaatggtccaaaatcattaccagattatgttaaggttcttgaaccaaaggaagataaaagaattgaagaaccagttgttgttatccttaaacaacaagctaaggttgaatcaactgaagcagctgaacaagttgaagcttaaattagttaataattttaataatcttacctatatatttttttaataaatcttatattataataaaaataaaattataaattaaattaaataataaacaatacaaaaactaaactatactatattatacttattcttccattcttctcttttgttctctttcataatacatattaagtaaatcaattgctttatcaacagaatatttagtaccaactaatgtaatttccctttcattatcttcattattttcattctcaattgcaactgcacattgtgaaataattctaatttcttgaattcttgatcctcttttaccaattagagctccaatatattcatttgggaaactaatctttttgataatttctttacctccaactcttgtattttcattattataattatgagatgaattgttatttcttctgttgttattgctgctatttctattattataattaccattatgattataattattatgatcaattggtgaacatggaatataataagtaactgaatgattaccttgataatctcttaataaaaatttagaaattaatttaattgcattttgtaaatcatttttattattaccttgaatttcaactaatctttcatttgaattttcaaggaaatcctttgatgcaaccattttaatattaaatttttcttgaattgatttaattctattaccatttttaccaattaatgtaccaatttgagaatttggaattaataatcttaaaaataaattattttcatattcaattgatttataatttggtctattacttaaaggttttaatggtgaataatcataagaaattaatcttaatggatttgtaccctttaattcacaatctttaatagtttgaacatttgcatcagtaactgattgtgcaatatctgttaatgataatgaaacattatcaattttgccactaattgataaaactctatcaatacaaccatcaataacttttgaaacacctgctttaatatcatatttatctctaatttgactaatattactaccttctttaccaataattgctcctgtttctcttcttgaaactaaaagtctataagtaattgtagattctgataattcatcatcatcatcaaattcttcttcttcataattttcatgttggtcttcctcttcttttccattttctgcttcttcaccttcttctttatcaatagaattttcattatcggaataagtttctaattgagatgatgatgaagtattttgaattgtatcattaatattgacattaattggttgattggatgtatttgaagtgatactattatcaaataatgattcagaagctgacattttttttcttgatgaatgatgattggtggttttggatgttaatttgaagttgaagtaaaaagtaaatgggacttaattgagccggagaattgtaaaaatagaaattgggggatgaaaattctaatttaaattaatacgatattggatcagtgcaacttgtaatggtatgcttgaatataactataacaaactgtacttcaagagaaagagcaagtaatcaatcaataatattatcgccacctatgacacacacacaataaaatatgaaatttcgctgagcattgaaaatttcaatacgtatatatactctttattacttctacaacgatctactgctattactattacaatggaacatcacgctgattatgcagagtttgactcttcactaaataggaaagatgctcttgaatctcttattatgtcgtatactgctcttgcagaatctcaatcaaattgggtagctaatttagctaattgtagttctcttctatatcattgttataataatgctggtgttaattgggcaggattttatgttgttgatgttgaaaatccagatttccttatattaggtccatttatgggtaaagttgcatgtcaatcaattaaaattggtaatggagtttgtggtactgcagcttcaactttgaaaactcaattagtgccaaatgttgaagatttcccaggtcatattgcatgtgatggtatgacaaagagtgaaatcgttgttccaattgttcaaaataataaattaatcggtgttattgatttagattgtactgaattaaatggatttactgaagttgatcaaaagtatttagaagaattagctgttaagatagctgaaacatgtaaattctaatcataagtatattttacttaaagttttttctatacaatattttctaacaatacattgttagattcattttccctctctcttttcctctctttgtaaataaatacataaatgtcagataatataattgctaataatgaacctgcaatatttgaaattatatcataaatatcgaaaactctaaatggtgaaattaaatgttgtaaaaattcactaccaatacctccaattaatgtacatattataaaagttacatttctaactaaccatgtcattctagtatcgacaatccaatagaataacaaactaagtacaaaaaacattccaaaatgaattaatttatcatttggaagtgaaatatctgcaaatcccaagtaaattgccaaaataacaaaaataccaaaacctataaaaaattaaaatgttagttcccgtccattttcttcataattaacaacacttacctattaacacattctttctgatacgtatcggtatcattattacctcaattacttactgtaaaccacctgaaaagagcttcaatgatccaaaactacttccacccacaacaaatctcctgacgtggtggctggtcaaaaataaatttgtaaattcttacgtaatgggcatcatgaatattctgcaatgcactttacgagccatcacttctttatcagtggatagaggaaaggcctgatattaatttgcaagaccatgagttcaatatcgtgtggtatatgttttcggaaacacaacaagatagataaagatgtcgataatgtacaaaactcaattgatattgatgatgatccattttattgtttcccatgtgttaatttccgaatattgaagtatagattaaacattataaatttacttaatttaaatagaattgcaattcacgatattgatcaaatattgaaggagtcgatgagcagtacagaaaatatatcgaattttctaaaagattatgttaatcaagatataacttctactaagaagaaattccaagatacaaatgtacctgttgatgttgttgcaagattagcatatatgataattaatcaaaggataagtacagcagaaattaatatttctaatgctaataagttattagaactgaagaaacggaaaaataatgaactccgaatgaaaatagaacaattaagaaaattaaagaatgataagattaaaaatatagaaaatttagaaactcaaataaataaatataaagataataaagaaagcacaaattgtataatcaccaatagacaaaatgaaatgatattaaaggagcaaaacacgttattgtttgatttattagcattatgggatgttaaaataattgaacaatcaaaacttagtgtcttattcacgccaattataccaataactgagttatttacaaagaatttaaactttataagtcaaatgttaattaaaatatcacaattcattcaacagtttagtaatatagttaacataagaataccatttgaaattgaaacatttcgaaatgaattacttattggtaataaatttttcaaaatgattagtgataatagtaaatcaatctatgatttatcagaagttggaattaatgcattgtttataagtataagtagattgattttgaacatttgtatcattttgagaacattagatgaaacatttagaaatgaaattaaaagtatgcatgatttgataaatattgatcaattattattaaggttagttaatattacaaaggataggatagaattcaataagtttatgaatttgaaaattgataaattattaaatgaaaaatatgaacagcttgaaaaacaaaagaaattaatacaattaaaaacagatggaaaatggagatggaataattggttttcaagagataataatagccaagctatagatactcagtcaacgactaaacaattaagcagaaagaaatcagttaatagattttcaataaatactttagccaattacacgaaaattgtatcaaatgctacctcaattccaaaagatattcagacacccgaccatgaacaccaatgggatctactacagatatccacattgagcacttctaacataccaatatcgaagacattcaccctactgctaccaacagtggaagagatagtgtttgtattactgagccgcgcaaaacacgtgaccggcacgtgacacatactgtcaaaatttattggcgtgtcaatagtggaaatagtgaggaattctttaaagaagtggctgcttcatgattattatttatgatgagagagataagaattgttataatcttataaccttttaaaggtgtatttttataatatttaaaggtaattgagtcttctattactatccaaagatgctttctgataaagaattatttgaattaaataaaaaggcagttactgaaggttttaaagttaaaccaagattagattataatacagttggtggtgttaatggaccattagttattcttgaaaatgttaaatttccaacttataatgaaattgttgatttaacattacctgatggtacaactagagctggtcaagttttagaagttagaggtgataaagcagttgttcaagttttcgaaggtacatcaggtattgatgttaaaaagacaagagttgaatttactggttcaagtttaaaaatcccagtttctgaagatatgttaggtagagttttcgatggttcaggtagaccaattgataatggaccaagagttttcgctgatgattatcttgatattaatggtgcaccaattaatccatatgcaagaatttatccagaagaaatgatttcaacaggtgtttcagcaattgatacaatgaattcaattgcaagaggtcaaaaaattccaattttttcagcttctggtttaccacataatgaaattgctgcacaaatttgtagacaagcaggtttagttagaccaacaaaggatgttcatgatggtcatgaagaaaatttctcaattgtctttgcagcaatgggtgttaatttagaaacttcaagatttttcaaacaagattttgaagaaaatggttcattagagagaacttcattattccttaatttagccaatgatccaacaattgaaagaattattacaccaagattagcattaacaactgcagaatatttagcatatcaaacagagagacatgttttaacaattttaacagatatgtcatcatatgcagatgcattaagagaagtttcagcagctagggaagaagttccaggtagaagaggttatccaggttatatgtatacagatttatcaacaatttatgaaagagctggtagagttgaaggtagaaatggttcaattacacaaattccaattttaacaatgccaaatgatgatattacacatccaattcctgatttaacaggttatattactgaaggtcaaatatcagttgatagacaattacataatagaggtatttatccaccaattaatgttttaccatcattatcaagattaatgaagagtgcaattggtgaaggtatgacaagaaaagatcatggtgatgtttcaaatcaattatatgcaaaatatgcaattggtagagatgcagctgcaatgaaagcagttgttggtgaggaagcattatcaactgaagataaattatcattagaatttttagaaaaatttgaaaaatcatttatttcacaaggtgcttatgagaatagaacaatttttgaatcattagatttagcttggtcattattaagaatttatccaaaggaattattaaatagaattagtccaaaaattatagctgaattttatgatcgtcaaagagataatgaagatgaagaagatgaagatgaggaagatcctgataagagtaatgataaataagcattttaaggttgtataaaaaagcaaataagtaatagtaaagtaataataaaaaaagtaagtgtatatctatgataaacggaatgaaaataatttttctcactgtatagtccggatacctaatgtttcgatgcattgtccagtcctttagtcaatgtcaattggattacttaatttaccaactgaaatattacaaaaggtatttaatcaagtacctaatgaattaaaattaacatgtcgaacatttattgtaatgtataataattattattttaatttatttattaaaaggtttggtattaaaacgattaaagaaattgaaaataatgaaaaacttattaaatcattgaaaaaatatattagatcatttgattattggagaggtacaatacgtaagattatttgtaatcattatggaattaaaggatattaatggaattgaaagtgaatttattagagattcatggaaattaatttatggaattttcatgaataggagaattttccttgaatatgaagattatcaatttaattataattataacaataataatcaaaatttaaatattgataaatctattaaattaacaacgggattatataatttatcatgtggtataattattaaaaattttaatagtatgagttcaaccaagattacaattataaatgaaactaataataatgaaattattcatgaatttcaaccagcaacaaattttagtgaattagtaccacataataaatttgtacttatggatatgggagattttgaaataagaaaaagaattttcgaaattgatgaaggtgaagatggagaggaaatttatgatccaatggttaatattagagtaattgttacagagaatggagaaatgttaaaatctgcatttataatatgttatttagatataaatgcatatcaattaaaggatataattattgataaggcgaatggtaaaatgagatgtaaatttgataaatattggattgcatggtggattgataatcaaatacctaatcctgataatgttgttgataaattattgaaaaatgtttataaaaatgttgataaaggtgaaggaggtgaagatgaggatgatgaagatgaagatattgatgtagggtttagtgagaaattttattcatgtgttaatgaagatggagagaagttaagtagggaatggaagtttaggaatcaaattgatcgtaggaaatttgaagagaataataataatgatgatgatgatgatgatgatgatgatgatgatgatgatgatgatgataaagttttactgaatgaaccgataaagtggaaaatgagtacaattctcgaaatatgatacataatgataaataatcatgatatataatcgataaggttgtgtatatttcttttatgtagagacaatataatgaatgaacaagaggtaagatcacgtacgattggacgtgcaataattgattttgataatgataatgaatatgagagattacatagacaaccatcaagattagatgaaagattaacaagggcacaaaaattagatattagagcacatcaaaggacatatcatggagcatatgtacgtacatgtattggatgtttatcatttagtttattagttatgaaattatttagtagagaatttatgtcaattggagttgtatttcaaatttattcaattattatatgtttaattggatattcaaggagtcataatattgatttatattttattaattttaaggataataattggtataaagattttatattagttgataatgaatcacataatgcaatttcaaatgaaggtcattatgatgttgataataaatattattttaaaacgagtggtaattatgttttatggttaacgattattacacttagttgttatataacattatttatattacttgcaattatgtaattatattatataaaatatctattcttctttaataccaccagtaccagcagtttcagctttttcaattgaagctttatcagttttaatatcaccaccagttaaatttgaaaggaaagaaggagcagccttgaaaggtctctttaaatcaccaacagctggggaattaaataaatgaattttaacaatatttgattctaaagcacctttaattggagtaattgattgcataactaaaggattagcaaatttcatataaagatgcataaaaccagtcattgctaaacctgtaaatatacctttaattgaagaatcaatttgttttaaatcataatctttaacagtagttgtaattaattttgattcagtttcaccagccattttatttggtgcatctaaatattttaaagttgttaaatcatttttctttaaaattgtaaatctaacatataaatatattaataaagttaatgattgaccaacaacgaatgctaatctaacataaaataaagtatcaggattttcaaaatctaatcttttagatacttgcataccaataagcattaatacaagatttgaaacagctggattcatggtgggtggtgttgattagaggaaagttataagaagaataagagaataaaataaaataaaataaaataaaagaacgtaaattcaagataagaaagtaatatacgtgtatataatgttgaaaaatgtactactaactactaagataatgaaaaattaccagtgataaactccacagttgattaatggacgttttcttagagtgagtgaggatttctttttctttttatttttatttttattagggtggcaaattaaaattatagacaataccgacgcatcgactgcagtatcattgtagacgcaccgacgcaaacgtattttctgcaatcgacccatcgacctcactaaccagccaccgtcgacgcatcgacgccaaacgcgtaatttttcgtctaattttccttatttttcgcaatttgttgacattgtttgatatttgttttaattgttgacataattatattattaattattgattaattgatgttttgattattgacattttcattaagtgattgtgttttatttgccattggtcgtatactcatataggtaacatgagtaaacctatatctgataactctcccactacgaggtctaattctaggaagagattacatccttcaactcctattatattaaataacgcgataatgactaactttaaggagtttaatgatatgaataatatggataataataatgatactgatgatattgatgatattgatgatattgaaatgaaggaaaatattccaaaatctccttataataataataacaaattacatccttttaaatcacccaactatttatctcatcaatcaaataaaaaagttacacttcgtcgttcaactggtttacttaatttatcaattgaagcaagtccaaatactaaaagaattataaataaatcttctaaaaatgatgaaattttgaaaagttttaatgaattaacttttaaaaataataataataataatagattatcttcaattaatgataataaaaataatataattaaacgacctagtgataatatgcaaaaaaaattagagaaaaaattagaaaaatataaagataaaataactaattatgcttcaacttcaattaaaaaaatatctccaattaaaataataatgatagtaataatactactactactaataataataatgataccaccactactactactactaaaaaagataaaaatagtataagaccttttacaactggttcaatacttaattcatctcaacaatcaaaacaaaaattacaaccttcatcaccagttttcaaatctgttaaacctttacaaactgcgtttaattcaaatggtttacaaagtaaaactattcttaataatattaataataaaaataaatttaaacaaatgcctgataccccttgtaagagacaatctaaaactgttgatattttaaatgttaataataatattaataatattaataataccatcactaataataacatatcatcaattaaatcaaaatctgctccaaatccaatatctgatgaatcaatttcatttaataattcaaattttactaataatactaattttactcattttacttcaaatacttcaaatacttcaatttcaattcaaccttatcaaagtagttttaattcaaaaccttcacctgttaatacatcaaatttacaacaatgtttaatgaaattttcaaatgaatttgatgatttttcaaatatttcaatttttaataataatcatagtaatgatagtaatgatgaaatttggttagaaaattcaaaattaccaattattacaagttcaccatcaaaattaccaacaactccaaatgaaaaatttaaatttaatataaatttatcaagtatacagaaaagtagtaatttaaatactcctgatagttataaaagtgaagatactccaacaaaggatcatagaattatattaccaacttcaaatagtaatagtaatagttcttattggcaaagagctaattcaagaaatacttcagtttattcattacaaactaataatcaaattaataataatcaaaattatccagtttttgcacctccaaagaatagtaaattagattctcctcatacaccaattgattttgaaatgaatatgaatttacttacatgataaagaaaagataaaagataagagaaaaagataaatttcatacttcaacaccttatagtaatataattaaaaataatcaacttaatattacaaataatgataataataataatcaagaaaatcatctcttaaataaatttggtaattgtacattaattggtaaaggagaattttcattagtttatgaagttttatttgaaaataataaatatgctgttaaaagaagtaaagataaaatacctggtccaaagacaagattaaggaaaacttgaagaagttgaaattttgaaaagtcttagaaataatattgataataataatgaaaatataataacgaatacggataataataataataataataataataataatgaagatgttaatgatgatggtagatatcatgttttaacacttatatcagcttgggaaagtaataattatctttatataatgacagattattgtgaaaatggttcacttgaaaatttcctgttaaaagaatgtgaaatttctcatagaagaattgatgaatggagagtttggaaaattttacttgaaataatgcttggattaaaatggattcattcaaataatattttacatcttgatttaaaacctgcaaatatttttataacatttgatggtttattaaaaattggtgattttggtgttggtacaaaattacctgtaccaacatttttcgatagggaaggtgatagagaatatattgcacctgaaattatttcaagacatgaatattcatttgctgcagatattttcagtattggtttaataattgttgaagttgcagctaatgttatacttacctgataatggtgcatcatggcaaaaactgcgttcaggtgatttatcagatgcaggtaaattaagttcaaatgatttagttggttcattaattaaaaacaataataacaacagtaatgataatgatattgaatttgagaaaaaatttcaaaattggactccttattggttatatgatggacaatttacacttgatagattagttaaatggatggttcatccaattccacatgagagaccatcagctgaagaagttttacaatcacgtgaatgtggaattgttcaattaagaagacaatcaggtgcaacaatttatgaaggtgattgtggtccctcatgtttcaattaatgatttagaaattgaaaataatttactacagaatagatatagaattcaagatgttgtaccataggtaatgattaagtatataatgtaattaaaaagtgtataatataataagataaaataagataaaattaaatgtaataacaattaaatattttattatgtaacaattaccggatgaatttttcactacattccaggcattacatcaaacttaccggtttttcatcactttcctttctttcctgtatactacctctttatataatctaatcagctaatgagtaaagaatcacagtaccgtcagtttgtcactacgctggttgatagtgataataaactaattcaaataacttcacaaccaccactggattatattgctgttaagaggaaacgaaatagaacttcaatttcttgtcttacatgtaaacgtaggaaagttaaatgtgatcgtcaaagacctatatgtggtagttgtgttaaatatggatataattcatgtatttatgattcagataatgtttttgaaagtgaaagtgatggtaatataagtagtgttggtatgaataataatggtagtacgaagtagcgtgaatgataataataataataataatagtactattagcaaaaataacataaagtttataaataataaggaaaatcaaaggatagataagacattgattaaatgatcaaataaatggaaatgaaactaataatgatcaagctaataagatttataattcaaggaaatgcacagaagaatttaaaaatttactgaaaactttagatacattaaaggaaactcatgttcaaaatgatgaaattgataatttaagacgtaaaattgaaaatttaagattttatcttagatgataattcaatttcaaattcaataattttgaaaaatttaccattaattggtagtcttacattagtaccaattttgaaaacaaattcaacaatttcaatgaattcatttaatttacaatttggtgcctcttcacttacaagttatgttgatattgatcattatatgggatatatttttcaaaaatctttaccgaaaattgaaaatgatatagaaatttggaagtctaaattttcagttgatatttatactgaagctttagaaatgataataattaatggtaattataatactaatcataattcaacattaaatgatgttaaacgttctaaatttagatttatttgttcattattagaaaaatattttattaattataatactttcattaatttattaaatagatcaacttcaatcatgttaatagctgtaccagtggtacctttaactttaataaatgaattgggtaataaacattttttatctgctaataatggtcaattaattataactaatataaatgattccgatgattttagtgaaattttattgattttagcagttttaagatttggtttacctaaaagtgaaaatgttttaataactccaaatgaattagattatacaaatttacttaatacagaatcaattttaacagattataaaacagatttacttaattcatttcttaaaataattttaaatgaaactgatttatcacaaaaatataatattccaatgttaggtacattaattatacttttcatgatttcttatactcatagatttaattttaaatcaggtaatacaggtattagtttaaattatggtataattgcaatttatatggcagtcaatttaggtatttattcaaaatctggtatttctgaaaatttacttcaagaaaattcaaataataattatcataaatttcttaaaaatgatgattatcataatatttggaatttagttatgtttattgatacttttacatcatttaattcaggtataccacaattaattagttcaaatatggaaaatatttatttaacaaaatttttagattcaaattgtgcagatatttgtcgatattatcgtaaagcatttaaattagcaaataatgggaatttttcaaataatgaaaaagtttcaattattaaatatgaaagatttgttattgaatttgaatcatttattgttaataaaattataccaacaagtatttgtcttacaaataatgatttagttggtgttgcaacttcaattagatcattaaatttattattattcttatattacaatagttatttttcaatcgttaagacaattgaaaattttaaatcaacaaataatcctcaaaataatataaaatattcattatatatggaacaatttaatgaattagagaaaagattattcaatagatgtattagattatcaattatttcactaattaatttaaataatatgcttgtttcaacattctcagaaaaagatggatcattttatgaaaaatattcatttgatcttattcaaatttttactaggattgtttatacattaacaagttgtgtttgtaaaatgatttcaagttaataaatctaaacttgctggcaatttagattctgaaaataatgttgaaaatattgaaaattttaattatttatttgatatttcacgtaaacaatcagaagatttatcaagatattttattatattacaatcacaaaatttacatttaaaggaaaatttttcacctgatataatacaaatttttaataaagttaataaattatcaaattatccaagtgcaattattaaattacttattggattcttctttaatacatcacaatcattaatttcacaaaattttatttattatgcattatacaaatattttgtgatggcagttaatgaatttcaagatatgaatgttaatttagaagactttgatattgatacttttatgaaacattactctcatgttgattgtacctggtttatcaacaaatgattatatcatctttaatacaaaggaattattctttatctaatcttatctcggaatttaaaatccgagaaaataaatggaaaaactccggaagttcattttttatttctataaattctttaaataattctccagataaaatactttgatataatattatttagacaaccaattgattacaaatgttgggtgataaatttgtgtatgtggctatttcaacaatacttgcattttcatattacatattaccacaaaaaaacgaacattatccaacttgtccaacagtagaaatttatagaccactgaattatactgagaataaagatattcttgataagattatcaatgatgaaacttttagaaattcatcactttataaaatgcaacaggcaattagaattaatacaactagttttaatgatgatttaccattagatgttggtaataatttagataaatttaaacattttacaaaatttcatgattttttgaaagatgaatttaagcttgtttatgaaaatttacaattacatatggttaatcattttggattagtttatatttgggaaggttcaaatacttccttgaaaccattattattaatggcacatcaagatacttcaccaattaatttgaaaacattaaatcaatggattcatgaaccattctctggtgattatgatggtaaatatttatatggtagaggttcaggtgattgtaaaaatttattaattggacatttagaggcaatagaggaattaattaaaattggatttaaaccaagaagaacaattatcttatcatatggatttgatgaagaaatttcaggttttagaaatgaaaatccaaaatttattgaaaatatttatggaccaaattcaatgtatgcaattgttgatgaaggtggagtttcattaatgaatgttggtgaaacacaattagcatgttgttggtacagctgagaaaggttatttagatttatccatttcaattgaaaagcaaggtggtcattcatcaattgttgataaacgtacagcaattggtattatgggacaattaattgttgaaattgataataatgaaatgccgaacttattttagttgataaaaatccaacattttatcaatatgtttgtcttgcagagaattcaattgatattgatactaaattaaaaaatgatattcttaattcacgaattgatcaaaatgcaaatgaaaatgtaagaaactttattaataaggataaatatactgcatatgcaattaaaacatcacaagcaattgatattattaatggtggtgaaaaaattaatgcattaccagaatatgttgaattgaatgatcaattcaagagttgcagttgaggaaaatattacaattgcatataataagtttgttaaagatacaacaaatatagctgaaagatacaatttaggattaaatgttcaaatggcatatagtgatgaaataattgaagttattcctgcaactgaaatgggtaaattaactattaaacctataacaatgttagaaccatcaccaataacaccaattggtgataaacactgggaaatattcgcaggttctattaaacatctatatgaagaacttgcatatcctgatagtaaagttgttgttacaccaggtttaggtacaggtaatactgatactaaacattattggaatttaagtgatcatatttatagatatagaccagggagttttaccctagtgttaatgctaattcacatggggttaatgagtacattgaatttgattcacatttacaaattattgcatttacatttgaatacattcaaagtgtcgatgctcttgatgactgattggtaattctgttgtctaaaacaatacgtttgtgtatgtattttatgtagatttataatataacaattgaatatttgaagatatatatttgctatcttggatgttactgccgtttaaaatgcggactatcagataaagtccttttgatagttattatttatacaaatcattaggtaaactactatacaaggagacattattaacagagtgatcatgcacccttgtggtatatacgtataacagtcaccgaagacagtaaaagaagaagccctgtgaaaagagaacatcataattgttaaacaaatttgataaattctattgttatatgtaagtgatcagagctatttaattactaaaggcaaatttatattttattaaataatgtctcattagggtttatatagtttttatttatattctacaaccccctgttcttctttgatgtaatttatttggtttatttgttatatatacgtatactatatgaatcaatttaaattatgagtaaaattaggaaacttggtcgcccttcattagtttgctcaaattgtaaacgaaggaaaattaaatgtgatagaaatcaaccatgtattcaatgtgttagatcagatataggaataacatgttcatatgatcattgtgatatgaaacctattggagctggtagttcaaatgatagtaatattgacttcaacttctgaaactgattcaaattattcaagattaaacagtgaattatttaattatccatcattagagtttaagaaaccatcgtttgttaaagaggaaaataatataaaatacgaacctccattatcattagaggcgatatttaataataataaacactttgttaaatttaggtcacttatgccatttttatttaatgttaaagaaaatgaaatttataaagtaatcacagacattaaattctaaagttgaattaaaagttctagttgatacttatacaattgatgaaataaatgaactaagtaaatactttattcatgccaaatattgaagcaatcaaggaaagaatttatttttttggtaaagaaatgatacctagtacatcaatggcatttataccaatgaagacaccattggaaatatttgataaatgtattataccacatccatttgagataaataaatatatttgtaaagaattgaatgatgaaacagaatatgcattatttgcaataattttcataatagttaaaatggttttatttacatctgaatttgataaatcaattaattttaaacattcattaaatttatcaatttcacaattaaatgattcaagtttgaagtttttatcatttagtaattataaggaaaagccaacatttaattcattattagcatttttattatatagaatgaattattttatttcagattcaatttcagaacattcaaatgctgaatcatttttcaatataactttagaaatttgttataagttaggtattcatataagatgtgatcatattgaaggttacgaagaagatcacattagaagagtttggaatgcacttcaatttcttgattgtatttcagcatttcatgtaggtcaaccattaaaaattgattatagatattcagttccaagattatttggattttgggaacctattatattatatttccgtaaaatcgttttaagtataaattcagttcaaccaattactttaaatgaaatcattgatttaactcaagatgcaattaaattattttcagtttttaaatcttttgatactttattaaatgaaaatgcagttaaatttttttttccaattattataaaatgtgattttctaatatgttatgaaactttactattaatattaagattatcaattgatgatatctctaaaataccggttaagatagatgatagagatttaagattaattgaagatttaaaattgaaatgtgaatgtcaattattttatggtatgattttaagtacaagattaataaaagatatatcaacaggtaatttttccaaacataatggtaaattattaattttaatgaaactaatttttggtagatatttattgctatcaaataatataatattttcatatttatcagttttcgataaagctaaacaatcaaataaaccaatttccacacttaaatataatgatgtatcaattgctgaattagagaaatatatttgtaaagaactggataatattacatttgaagattttgaatataaaaagatgagattattaatgggatcaattcctaaattgaatgaatatttaattgatttttatataacaatttcagagaattgtccaatgatacttgatgggtactttaatgtttatttcaaatttcttttatttgtttgtaggttacttcaagtcacatatgaatatacagataatcaaacatcaattgatacgaattttcaatttaaattagatgattggaaaatagttattgataaaacaactaattactttattaatagtggtgataataatgaagataataatgaagataataatatgtcaagtaattctaccagtaatagcaataccaatgtcaatgaatctcttcaatggggattaccaaccaatgaagttggtacaaatcttaatgctgatgatttaaagggtattgatgatatgttttttggacttgaaggaaattctggaatgttaaattcaccaattaatgggaataataagaatggagaacctaaattaaatgaatctgaagctctaataactggatcaagtaaacattttaatacatctgattgggcattccttgtaagtaatgaaattagagacaaattaggatatgctgaagataatgctaaggaaagcacagaatttgatgaaattttccaaatgtttattgaataagtgatgaataagagaaatgatgaaatgatgaaatgaataaaaactgtacataactttatataacacattcctgtatataaactaaataacaaataataccctaataataataatacttttgctaccaattgtacagtaagtagataatagaaatagaaatagaaatagagtgataatccaatgctgacataatacagtcacgtgaccaataaaattttaaaaattttctctctttgaccatagtatgacgttattgcacagttgtggaagctgggaattttttaattaattttttattagccatgtattattattgtattgtctattcggaggtttataattatatgatcatcataatcatttgattttaatcatttaaataacggcaatttactctgcttttattagagattattatattatttatatcctccaactattctttatacttcaactattattcacactattattttaatcattaattcaaatgcaaaaggaagaagttgtcatgtccatggggggcaaggacaacaacgataatatcgtggtgaaggaaaatttacagtccccaagtgttttagcaatatcaaatttaagatgtccatctccacctccaatattacaacataatagaagtattacctttgttgataaagatatttcacatattgatttatcaaaagaaaaagaaaaagaaaaagaaaaagataaagaaaaagagaaagagaaagagaaagaaaaggaaaaggaaattagtcgtgatactaataatggtaatgagaatggaatcacgagtttaaatggaagtggtgtatcaagtgatggtgaaattaatagtaaattgaatgaaaatccaattgtttcaacatcaattaatcatgatgatgatgaaaatccttcaattaataaaattttagaacctgtaatgcattatgaaaatactgctgctgctcatgctttaactgctgcaatggcagctcaaattgcaagagataaattagagaatggtaatatttcaaaattaaaatcatcattagagaaattaaatattgaaaataataataataataataataatactaatactaatataaataatcatcaaagagttagttcaatgcatgcgcatttttattttgatgatactataaaacatcctgcttcaactatgagatcaagaagtggttcaacatctcgtgatagtgaacaaattttaaaatcaccattcgataataataatactaatccgaacaacccaaataataatcaagcaatttttgttcaagccggtgcatctaatttatcaaatgtttcaactacttccattttatcaacacatagtccaataattaataataatatactggaaagtagatctaattcaaataatattcataatataaatataaacacaaatacaactactaataacactactaatactaatacagttaatacaccagtatcatcatcaatatataatccaaatagtggaggattaacaccattaagtgtagctgctagattacaacacgatgatggtaaattacatatattatttggagcatgtggttcagtttcaatcaaaaagactaaattaattattaataaattagaagaaatttataaagataaagttaatattcaattaattttaacaaaatctgctgaaaattttattgcaaagggagaatttgcatcaaatataaatatttggagagatagagatgaatggagtacatggaattcaagatctgataatgttttacatattgaattacgtaaatgggcagatattttaattgttgcaccattaagtgcaaatacattaagtaaaattgcattaggattatgtgataatttattaactaatgtaattagagcttggaatagtcaatatccaattttattagcacctgcaatggtttcatttgcttatacatcagttataactaaaagacatgttaaagtaattaaagaaaatatgaaatggattgaaattttaaaaccaactgaaaaagttatgagtagttatggtgaaattggtatgggtggtatgatggattggaatgaagttgttgttatgattgttaataaattaggtggatacccagaagatgaagaagaggaagatgaagaagatgaagatgacgataataatgataacaatgataataacgatgatgacgatgatgatgacgatgatgatgatgacgatgatgacgatgatgatgacaatgatgatgaagatgacgatgatgaagttaaagaagatactattagatcatccaccggaatagaaccacctgcatcacagactatacaattaaatagaaatacgaatacaattccgaatgtcgaaccagtaccgaaacaagaaatagagagtgatgatcaagaaggagagaatattgaagagagatttgaagatgcattagaagatccacataccaccccattatctgtaaactagctacatgtagaataattgtagtatgaaaaattaaataaatacttgataagattaataagatttataaagaactatgatactgctcagtattacataagtggattattcaacctttttgaaaaaaaccgccattttcaacgaccgatggcttatttttctgacaacacccgttgtttcatcggatggtttcatatgatcaactttgccctctccatatctcagttgtccattagatgcatttgagaccttattacaagggacattctaaatggtctcagagttcagatgttactgatcttgttcaattacttttattagttactaatacatctgcatctaaaaaaatcttacaaaggctcaacattagattgttgttgttaattttacgtggaatttcaaaagatgaagagaatgatacattttatgaatttgatgtattggatgaaaagataaagaatttatggttggatgtacttgatgtgctcaacaatttcccgtgtgttaaacttattgatgcgtattctccatatcatttaggttccagtggattaaataaatcaaatagtgatttacaaattttacatggtaataatggatctattggtaattatgaaaataacaatggtaatagtacacctataaactataatcttaataataatggtaatggtaatggtaacggtaatcataataataggaaacaaatctccaaaaatggattctttaatgaaaatactgtcgaagcttctacttggtatgacttagcaattgattcagaagattatgatttcttactggaatatttatttgatatagaggatgaaaaatatggtataattttcccacttattgaagttggaactaaaaaattcaataaaatatatgaagttttaaatgatttttgtcatcatattaaaatatccaatgatcatttatcagttatcaaagattctgagaaatttatgaataaattgagtgttttaacattggagaattatgaatattctgaagttgcagagaaattatcttatcaaacattgaacgttttaggtaatgaagttgatttattcactatttcagcaatcttagaattcaataaagatttagagacaatatattttaagggaagactgagagattatatacctgcgaatataaatcctaaaattaaagtatattacgatttagttgtctttgatacaattgatagagttcagatacaaaaattagggaatatggagagaataaataaattatatctaaattttacactggaaactgatatctccctagaatggttgaaattatgccagaatttaaaatttattcattttggtcttaatttaaagtcttcatcaagtacacaaacttttacactccttaacaaattccccaatcttgaagaactatacattaaatattgtaatttgagattaagttcaaagaatcaaaaagtatctgattataatctttttccaaagcttaaatatttaacgctagcttattgtcaaacagaatcaactttcttacacacaatttcaaattctccattaattgaattatatttggataattgtaagatcaaatataattcatttgtcaaactaccaaaatatttaaaacttttctcagtatcaaataaagacaaagaagagtttaatgatttaatattcttatcacataaggcaagatcatcatctggtataccgagcctgaaatgtattttactaaattttgatggaaaattggtaaatcttacatctccatcaatgaatgatgtatattttgctaataataaacagaaggataaacttgaacttaatttaacatataataaaccatcatcacgtcactcatcattcacttttatggtatatccaacatctgaaaacactgatttttcatttttgaaaaatatagcaaacaagtaccatgttaaaaaacttattattgaattgtacacatattccaaagaatttttcgaagcaattaacataggcaatattaaaaatgtcaaagtttataaatataatatttatgcaatgtacaactacatgaatgaattactcgcaaagccaagcttaactccaaaagaacagagttttttccttccaggacattatagacaaaaggagaaacctgaaacagactctaaaaaagataaactagctaattcattgataacattactgcttccaagagaagcatcaacatcaaagaacaatcattcaaatcatcatactaaaaatggtagagtttccaaagaaacttatcaatatccaaatgattcacgtatatgtgatatatgtttcaaaagtttcactagagctgcttcactgacaagacatttactgaatcatcataatattgttaaggataacacatgtcatttatgtggtcgtactttcaaaagatcggatcaccttaagacacatttccgtagttgttcaaagaagaattgattgttttacaatttagaaaccttttttgagttattaactcgtgtataatatatatcttgactaaaactataaaccatataagtatcaaaaacatgtacatttagtctaactgtggaatcggttacatgcgaattttatgattgatgagaatcattatttaataagcttcttttctctttatctttccctttccacctttctttcttcttcttgttttcttcccttgttagaatatagtttgtggagataacagtttatgaatatttcatttataaactaaatctttggcaaattatcaacttcttaagaaatcaattaacttaataaataaaagaaaaatgcacgttaaatatttgcctatgagatggaaatgtggcgataattactgctacattttaagtgatgataaaagtaataaatcatggattatagatcctgcatttcctaatgatattgaagattatttgacaaatgaaaataaaactgatattacagcaattgttaacactcatcatcataatgatcattccggaggtaacaaatttcttaactccaaattatttaataacttacctgttattgctggtaaagattctccgtgtgtttcatatactccctcagatggtgaagtaattcaattgggtaacaatgtcgaaattactgcaattcatactccttgtcatacacaagattcaatctgttattacgcagttgataaagaaactggacaaaaatgtgttttcactggtgatacattatttacatctggttgtggtagattctttgaaggtaatggtaaagagatgatggatagtttatttaaattaatgaaattacctgatgatacaattgtttatccgggacatgaatatacagctggtaatgtcaaattttctacttctgtgttgggtaaagataacaaagcattgaatgatttagataagttttgtaaatcacacgagtttactactggtgagtttacaatctctgatgaaaagaaatttaatcctttcatgagattaaatgatccagaagttttaaaagctacaggtttagaagatcccgttcaagttatggataaactcagaattatgaagaatcaattttaaaaagtagactacacacaacttgttaatcattattattctattaaacacttttctcctatatattttctataatttcaaataaattttgaataccagagactaattcttcatcatagccttcactaggagtatattttgcatgtgcaaagtctataaatttaagacaacttaatggtacatcttcatccaattctttgtcgtctgtatgttcggtttcttcatcttccgtcatcatcgttgattgttggagttgatataattggatcttcgtaatttttagcctcccatctggataaatcattttcaaatacgaaaaacaatgatccggagataacacgtatttcttcttcaagtaaacaattgtataacatttgcaatcgtacatggaaattttcaatcagtctatcttggacatgctttggtaagttattatatctgaagaatattttcaatccttcactgacagtatctttagttaatttacgtccaaaatatttatcaaacgtaatgtaatcttttttaaaagtagttgaagatacatctttcattttgaaacctggtaaatcttcaggtaattttccatcaaatgaatcttttataaccattcctgcaattctaaactttaatgatccacttgtagtactttgtgaaacttttttcattctttcaactttacttgcatttgctgatgagtcatacagtattgaacctaatttaatatctaatatacttggttgtgaataaccataaagacaatttttcaatataagatattgtttatgatcaccttcaatttcaagtgtatcagttgctttatttaatgttttttcatcaattgcaccattactttgctgaattaaatcatttgaaagtccagggtataatacaccaacatattctggcatccaatcagataatgaatctccatatggtacgtcatcattaattttcattcttttattttgagtttgattgtagaattcgaatttcttgaggttgtgatggtttaatgaataatgaaccatctactgtttgtaatggaccttcatgacctgcagcttgatgtgataacggtattagagtcatattgatgaagatttgatgttcaaagagaaaaaaagtgtaaaaatgaaatcatcatgaaatttattaacgttttaatgagattcatgtaagagtacagagtgatgaacaaacgttaaatgaaaattagtaaaattagtaaaagtatctatgaagttataaaagtaaaagtgtatacatagtataatgatcaatgtttctttcttgattggttagcaaatctacctttactaactttaacatgaacgggtttaacatcagcaccaggtaaagaatggtgaaatacaattatcagcagatccaccaccaataaaatcttctaatgctttttcattttgacgttgttgccatttagcatctttaattgcttgttgatattcacgttgatcttcactgaaaaatccattttctaatttatcattaccacgatgttggaaacctttattaccatatcttttagttgtctttttagataatggagatgcaactgaataaacattacctcttgtacgccatacaaaattagactttaaatgtggtgtaattttaccagtatctgaattaattgaaacaggaatacgacgtaatgttgcaccaccacaatttggacaaaaatgttttggagttgtatcctttggaatgggtattaatgaaaaacatgcatgacaacgtaacatatagtttctaactcttttaatttgctaatcctgacattgtattcattaaattcattcctaattgtaatgaaacattttgaactgcaaaatctccactggctaatgcacatttaatttttgtttgtgttgttgtttccttttcaattttatcagtaccttcttctcttgcgaataattgtaacaatattatctggtgtaatccattcacctgcatcatcatcgtcatcatattctgcatctaagttttcttccttgacttcttccttttgattcttcagtggtttcttcttctttgacatcttccttaacttcttcctttatttcttccttgacaacttcttttggttgtgaagcagcaattttactcttacccctttttctttggtttgacaatttcaaatccatcgtcatcaacctttctatcgtcttcttcttcaactttagaacttggatcttcacccttttctgcgagtcttttcaatctatcttcttctctaattcttttttcttcagctaatcttatttcatcctctggtctaatttcacctggaaactttctaaatctggaaacaccaccatttgcttcaatatcaagttcgtaagctaatgcaataatatgtaaatcattttgtgataaaactgttgaatcaccggttaatttagcaaaatgaacaacagcttcaatcgattccttctttggatgtctaacttgtaacttatcaccccaaataataagttgatttctaactgattcatccttcaattcattatagacacctggagttgtgtaaaaattatctgcaaattgttgtaattgtgtggcaggttgagtaatgattggacctgcatccaaaactaaagtttcaacattatgtttagtagcttcaagttgatctgacatattttactctatatgctgtgtatacttactctaataaacgtatattcaacgatataatcactaagaaagttgtagttgaagcattaaaatttcattttaaaaattttttttttcaaatgttgatacacagcctcgaagattgcaaaacttactttttggttactttaataatcatcacggtgtttattaacaaagattgtagacaaatataatgggtgttgcagaatctgtacaggaaatagagaagttaattgatgccagtaagctaggtgatgctgatgggattgctgataaactattagagtctaatccatcgtgtaaaattttaattttaaaatcacaaattttattacaaagtggtaaacttgatgaatgtcaaaattatgcaaataaagcattaaagattgcaattgacgaaggtaaaaggttaagaattgcagaatcttgtaaaattatatcaatggcttactttccagggtaaagattatgaaaattcactaaaatttataacaattgcatcaaaatatattgattcaaatgataatgaaattactacattgaaatctgtaattgaattaaaatttaaaaaatctgaagaaaataaactgatgatgaattagctaatgtggaatcagagatcgaaaaactatcattggaatcattaatctcatctgataagaaggttgaaacaacaactaccaaacctgaggtaaaacctgaatcaacggaaacgaataatagtataatcaccactgaaaaaatcagacatgattggtttgatacgggtaaatctatagaattatcgatttatgtgaagaaaataaataatgaaactgttaaaataacatttagttcaacaagtagttgatgtatcattcaaagataacgacaatcaatcatacaatttcaccattcctcacttatactctacaatctccacaactgaatcaagtttcaaagtatacggtactaaacttgaaattatattaattaaggataatccaatgtcattggaagtaaattagagaatgataatgataatcaaaaggaggaattattatcaatacctaaggaagaaagtaatccatcattatcatatccatcatcatctaagaatcataaagactggtcaaagtttggaaatgatgatgatgatgaggatgatgaagatcaagatcctgaagcatttttcaggaaattagtattcaggtgcagatgaagatgcaagacgtgcaatgatgaaaagttttcatggagagtaatggtaccagtttaagtactgattggaaagatgttggttcacgagaggttaaaccttataaagatggtgatgatgggaaatagatgaataaacttaagtaaaattaaaattgattatttgcttattatttattgtacactttatataatttattaaataataatataactttacttaaaaagtatctgaatctaaactcagattataagatgcatgattatcattggtttctaaacttttagaaatggttgtaaaagataaaagttcatttttaatgaaattattcttttgtttcaactcatttaccatattcattttcattttcatattattattattgttattgttattattatgattttctttattatcttcattatctgaataatcaagtattgaatcgcttaactcctccacaggaattaaattgtttgaattgtttaaattattttgagtttttaataagttaacttttttattagatctattagttgatgtagaatctttattggaattagaaaaaataggtaaattgactatgatcattatatcattattattattactaaatgtgttggaaatcatactcattggcgatcgtttaataacattaggtgattttcttaatttatttaatgatctagtaattgaattatttttctctactgatgaaaaattaggtgatttaattggtgcagtggtatcattattgttattagtgttattattagtattaattttagttgaggcatttaaatctagggtaaaattagaacttttaacaggagatctaccacgtaaaattattggttcatttgaaagtgaatctgatgataatggtaattttttagaactattagttgataataatttattacgttttgaaatacttggggtattaattgaatttgttcttgaaggtgttggatttctagataggaaaggatttgacatttgtgttggatctcttcttctaattattgatctcgatggagttactaaatttttactatatttattagttgaagataaattattatttctaatattaggggatattgttggtgatttaaaggatgatctaatatttctctttttatgtaagaaagaattttcaatttcttcaattttatttaaatacaattcaccatttaatttgaaaactctaccactatcagtttcaaattgattaatttgaattctaatttcattcaataatttaggtaattccttttgaagtctatttcttgtaatttcttcttgttttaaaattttaaaagaatttcttttcaataaacgagatggatcttttgatgattcatcaagttctctcttttgtatcattaaatcatctaatttagcaatcatatttaataaaggttttaaattttcactttcatttcttaatctattcaattcatttgtatgagaattaagtaaatcttcattaaaataatcttcattatcaatataataatctttaaaatttaatttactttcatcatcatacattaaaatatcccaaaatcctttaattttttcccttgataaattaataaattttttaatatttgctaatttttcaatttctaattcatttaataaaattttaaaattttcaagtgattttaatttaatatttttattttttttaaggaaactttgaatttcatttgaatttggtcttaaaattgaccataattgttcaactttaattaaataatcatttaataaaagttctctttcatttttaatattttgtaattcattgaaaatagaattatattcatcaaatatttgatcttttataccaattttagataatattaaatcattttgatcaatatatgaaggtaattttaaaaaatcttgatctgaaggtataaataattcattatttaaatttataacacttataattaaaattttcaaatcctctattctttgatttatataatcttttaatgaaattatttttaaatctaatttctctattagatcaggattaattttattaaaatttgtttgtaatataagtttaatatcaattgcttcattaatttcattaaacagagaaatatctgattttgttggtaaattatttaagaatgaaatatcaataatttgattatttttatcatcaattaattcatataatgaataaaataattttaattgtttattaaaagataataattgttgagataatattggtattaatctaattaaatttttttcaacatctttatttaattcaaacattgataaatcttcattacaataattttctaaatttttaaaagaatttgatttataatctaaaattaattttcttatagttggagttaaaacagattcattaattgattcaattggagaaaattttgaagttattgaaaatattttagttatagtttctaaagatttaataaaatcatttgttaatttttctttatcttttaataaatcttgtaatatattatcacaagtatttaatagagatagtacttccaattattaagttttttatctttattacctaaaagagaagctaaattttgaatttcatttaattttttaattatcatatcaattggcagagcaaatggtaaattattttccacaaatcgtataggagatttttcctttggtgatattatttggcttgaggtattgatgttagtactagtattattactagtatcatcatttaatttatttgataatttatttgaatttatagcagaagatattatatcaactaattgatcttttgaaagatcagtccaaccctctttgaggtgcattatatgatttgatgctgtatatgcagatagaaagccttaaaaaattttaatacaatcagtaataataatcttcaaatgaaaaacttctactatcaaaaagttatctactattatcattcttattatttacatttgatgcaatgtcaaacacgaatatgaggcacatcgcggtgtttaccttttgcccttttgggaagtgttacgtaattcagtcacgtgattgtgattatgtaatattggtcacgtgatatatattacgtaatcgttgattatgtaataattagtattatatatatataatcaaatatcattacataatcccaacattccacattacgtaataatgaaaacggaatttattacctcatagagtcaaatgatcctctcaggaatttgttcaaatatacagttattagtaatattataatgataataatattactactattactatcttattattagtataaatacacacgtaatgtagtataatatagtatagtatactcaacttacttatctttctaatatctataatacccatcaataatcaaaagaaaacacttgaaaaggtatacataactttcttttatacaggaaaaacttttaattcggggtctgtcatcatcattactaaaaaaaatatttttcgtgacaaattctatataattttgccatctaatttttcttatcttttatacctacccttttctttctttcctagttcccattaaatacattaattaactaccttttaacaatgtcaaatatattattattaattcatccaactttagtaactcaacctgaacttatatctaatcaaaaaattcaatttaataatgatttccaaaatccaattattaatcaatacgtcattgatagagttgcatcaaatcaacaacctttattacatgaaaattatgatttaatttattatttagctccaaatgaagctattaataatcaatttaataaaaatttattaaatatattatttaattcattaaaggaaaatggtaaatttactggtttaataccttttaattctgaaattttagcaattcaatctggtttcttaatttcaaatgataataaatcttggattaaaccagttaattcaatttcaaataatagtactgttttattaaatagaaaatcaaatactaataatactactacccctaatacatcttcaattttaccttcatttaaaagattatcaactaattctccaccttcattaactgattcttcaatacaatcagataatgaacctgataaaattttaaatgacgatgaaaaaaaactgaaattatcatattttaatacaaatgataatgatgatgataatgaaattattgatgatgatgatttattaattgataatatatcatcatcaaatttaaaaccaattgttgattgtagtataacaggtactaaaagaagaaaagcttgtaaagattgtacttgtggtttaaaggaaattgaagaagctgaagaattaaaacaaaaaaatttacaaaattcaattttaagtaaaatggttcaatctgcaacaagagaagctgaagaaattgaacaaaggataagagaaagagaattaaaagaaaaagagaaagtatcttcatcaaatgtaaagaaaacaattgttagatttacagctgatgatatgactgaaattgattttacaattgaaggtaaaactggtggttgtaattcatgttcacttggtgatgcatttagatgtgattcatgtccatttttaggtttacctgcctttaaacctggtcaaatggttacaattgatacttttggtgaagatatctaatcaatttatttatcataactataatcacaattataattataattttcattattattctattcattatattcattaaacaggtatacattaacatttttaaaaaaaaataccccccataaaaaaagaagtcacttatatataattaataacttttctataaataacataacttaataatcataacatacactaaatatctccattacttttacatttaagtaatgtttcatctaataatttaataaaattttcaggtgataaatcttttgataaataatttttatcaaatttataatattcattattttcattaagtttatcaccaattttcaactgtttaatttcatcaattgataaattttcaacttgttttaataaaatatttgggaatttccatctatatttattacaatatttagaaatttcataccattgtaattgatttgaaataattaaattatttgtaatataatcataaattttctttgcatcttcaatcatatcagatttaattgttgaatcaattaaattaagataaatttttttatctaaataaatttcatgatttattaaaacattaattaatttaattgcaatttcaatattaaattttaaattatttgtatcaataaaataatttataatattatttaattgtttaatatggaaatgattatttctaattttagaataatctaatgaatttataattaaatattcataaaattttataatataatttgatgtgaaaattggtttaaataatttatcaatatctttatgaaatgtataatgaacaaaaactgataatattgaactatcatgattatttatactaaatggatgtaatttataatcattaccttttaataaatatttaatttcactttgttgaaatggataaactttattaaaataatctttaaaacatttcttaatttgtttcctagtataacatttctctggtatatatttcccatataataatgataatgtttccatataggggtaagtattatgcattattaaatcatcacgtatattaacatttggtaaatcatttatatgtaaaatttttaaattatcatttaaatgcattctttcattattattgatactttccctatatttatcatcagttgttaataaattaagttcctctaataatggaattgatttgggaaataattttataaaatatgcaagaaaaattgaatatgatacaccttgttctttagataatattgataagaaagttgtattgattgaaagtaattgcgtattagtaatagttattgattttaacttacaatattttaaatatttgtaaagaattaataaataatattctaattttttttcatttgatattttcgtacatttagtaagttctctaagataaatatgaatattatttgaattaagtatttcctcaattgaaggttttaaatgagtaaaatttttaaattttgatagtttaattttatatttaataagttgattgttaattgtttcattatttatggataatttttccattaattctataaatttatatgcatcattatattttttatgttgtattaatgtatcaattgtaagtattcgaagtgtatcattatatctataagtaaatatatcattgattatagtttcatttttttcatttggattaagaattccacaattcttaattaaatcaattccaagaattttatgatttgttatatttgaaatatttttcaataatttaccaataccttttatttcaattaaattaaaattaattttcttttctattaataatttgaaaaattcaatattttgataattatttaattttaaatcatttatatcaataatatctaagttttgaaaaagtaaattaaattgatcaataactaaatcattttgtgatttattattgatattttgataaatttctcttaattgagatcttaatttaattatatttgataattgatcttgaatttcaactttatcataagtatcgggacatgattttaatgttataatttcaattattgaattattatttcgtaaatgtgaatttgttgagaataatcgtattttcaaataagtagaatacggtatgggtgagaatttaattatccctaatttattgaaacgtaatatcattagttaaaaatataacgggtaagtatataaacccggtttagcttatctgaaaagaaattaattatcaaattcagatccagtgactgaaaaatcactaaatttttggtgaaattatctgaaaaattgaagactttattttcatgttaggtaccttctatttcggaaatttcattgatattggaaaatttcaaatcttcggaaaattgaaaaattgatgtttacgacgtatcgtcgcgacatgggtattgttgtgattaatatgattacataatctttttattattattttaaattaaattattattataatctccgggaacaatttgaaagaaagaagaaaaaaaagtgaaaaaattcccgctcggaaaccgaatactaactgttattataaactccttttctattattggttattgtaagaatcacctttctcctctatttagtattttgtattctataataaggtaccatatagtagataatctaatagtctattgatgctatctactcattcactctctacacagtgaaataaaacaaaaagtaatccaaaacaagacacaccctactgaaaaaagaaaaccttttccgtgtcaggtccgaattccgggtcccccttacgtaatccccacccccataatactaatccccgttggtccttttactaaaagcacacactgagttagcgctgccctctctaaaattatcttcattgagttatattccagttcaagtacagttaatgcggtgttttatattatttttccttttcctgtgatttcatttgttgttattactattggtttcttttaagtctcttgatttgaattttggaattttgaactttcatatctatttcccttttaacatctcctcatcaaaccatgcttagatcattatcaaatcaaatctcaaaacatcaaagaaatgttttgagattaaattctaaaaatggtaatttattcgttaaaaattcaacaatttcaattagaaattttggtcaagattctttccttcaaggtgaaaatgcttcttatgttgatgaaatgtatgaagcttggttaaaagatccaaattctgttcatatctcatggaatgcttattttaaaaatttaaatggtaatagacctgcaagttctgcttatcaagcacctccaactataattccaaatccaattggtactttatctttaactcctgattcaaatacttcaattggtggtgaagatgttatgactcatttaaaaactcaattattagttagagcttatgaagttagaggtcatttaaaggctaaaattgatcctttacatgttaaatttggtgaagcaaagaataaaccatctccaaaagaattaactttagaatattataatttatctgaaaatgatttagaaaaagaaattactttaggtccaggtattttaccaaaatttaaagaaaaaggtattaaatctttaaaattaaaggaaattgttaattattgtgaaaatatttattgttcaacttatggtattgaatatattcatattccttcaagagaaaaatgtgattggcttagagaaagaatcgaaatcccaactccttataaattctctcctgatcaaaagagacaaattttagatagattaatgtgggcttgtgaatttgaaaatttcttatcaactaaatatccaaatgataaaagatttggtttagaaggtgcagaatctgttattccaggtatgaaagctctgattgatacagctgttgaatttggtgttgaagatgttgttattggtatgccacatagaggtagattaaatatgttaactaatgttgttagaaaacctgctgaagcaattttcaatgaattctctggtgttacaattaaagaaggtgaaggtgaaggttcaggtgatgttaaatatcatttaggtatgaattatgctagaccaactacttcaggtaaaactgttaatttatcattagttgcaaatccttcacatttagaagctgaagatggtgtcgttatgggtagagttagagcaattcaacattataaaaatgatgttggtgaatttaataaagctttaggtgttttattccatggtgattctgctgttgcaggtcaaggtgttgtttatgaaacctttaggtttaactcatgttccagcttttgcaactggtggtacaattcatgttattgttaataatcaaattggttttacaactgatccagaacatgccagatcaactacttatccatctgattttgctaaaactattaatgccccagttttccatgttaatgctgatgatgttgaatcagttgtttatttattcaatttagctgcagaatggagaaatacttttaaaactgatgttgtcttagatgttgttggttatagaaaatatggtcataatgaaactgatcaaccttcatttactcaacctttaatgtatgatattattgcaaagaagaaacaagttttagatatgtatattgaacaattagaaaatgaaggtactttcactgctgaagatattgaggaacataaaaaatgggtttgggatcatttagaaaattctttcagtaaggcgaaagattataaaccagaatcaagagaatggttaaccgctccatgggaagatttcaaatctccaaaagaattagcaaatgaagtcttaccttcattaccaacaggtatttctgaagaagttttcaagaaagttggtaccgctgttggttcatacccaagtgattttaatgttcatagaaatttaaagagaattttaagtaatagagttaaatccattgaatctggtgaaaatattgattggtcaactggtgaagctttagcttttggttctttattattagaaggttatcatgttagagttactggtcaagatgttgaaagaggtactttctctcaaagacatgctgttttacatgatcaaaagaatgattctcattgggttccattaaagaatttaagtgaagatcaaagtgattttgttatttctaattctactttatctgaatatggtgttatgtcatatgaatatggttattcattaacttcacctgatgcttatgttcaatgggaagcacaatttggtgattttgctaatactgctcaagttattgttgatcaatttatttcatcagcagaatctaaatggaaacaaagatctggtttagttttatcattacctcatggttatgatggtcaaggtccagaacattcatctgctagaattgaaagatatttacaaatgtgtaatgaagattcaagaaaattcccatcaccagaaaaattagaaagacaattacaagactgtaatatgcaagttgtctatccatcaactcctgcatcaattttccatttaattagaagacaaatgcatcgtcaatttagaaaaccattaattttaattttctcaaaatctttattaagacatccattagctagatcatcaaaggaagaattcttaggtgatactaaattccaaccaatcttagatgatgttgaattaggtaaatcaattaatgataaggaaggtattaagaaattagttttatgttcaggtcaagtttatactagcattacataagagaagagctgaattagaaaataaggaaactgcatttgttaaaattgaacaattacatccattcccatttgctgaattaagagatactttaaagagttatccaaatgttgaagatttcgtatggtgtcaagaagaaccaatgaattttggttcatattcttatgcattaccaagaattattcaaactcaaaatgaagcaggttttactgttaccattaagatatgcaggtagaaatccatctgcttcaattgctgcaggtaataaagcattacatcatgttgaagaagaagctttcttagaagaagtttttggtaattaattgaattacttaaacttttaatatgttttgatgacccccctaaatcctttttactttttgaatttattctttacaatgatgattgaatttgtgttttttttttttcttaattcttcttcttcttcattctttatttatttatttattctaaataataatatatatcatatatctaaatctatttattcctatttataaatttttgatattataacttgttaagtttattgttatagtttgaaaatacgaaatagatggatgattcagttagttttctgggaattataaaaaatctccgggtaaatcgcgtagatgattcattattggggtttactgtaaacaccggcgacaatttttgaatcatcgaagcctgaatatcatttttcaataatatatggagacaatctgaaaagattgaaaaatgctctataaaactataataataagtacaaaaaattacttttgctataagagcaaacagttcaccccaaaaaagcactactaaccttatagaaaagctcattcctaataaggtaaataataatttcctgaaaactcttaggggcaatttgacattttcatttcataaaagttataaatgttgccctgtttatagcaattacttttggaaagtaaaccaaatacatttctttattatttgccactgttttcatttctttctattacttatgttttatttaaacttgaacttttcaagataacaacatcaattatgataatgaatactatttcacgtacatgtgtaattttaacatatttattaccctttgtttattcaataattcatccagttgaaattagaggtaatcatttctatgattcagttattaataaaccggtatgtattataaaatcattattttgactataggatacatttttactaacatttattcttgctaccattaatttttatagtttttcataaaaggtgtagattatcaaccaggtggatcaagtggtgttaatgaacatgcagatccattatctaatcctgcgcaatgtgctagagatattgcattatttcaagaattaggtattaatacaattagagtttattcagttaatcctgatttaaatcatgataaatgtatgacattattagcagctgcagggaatttatttagttttagatgttaattctccgttagttggacaacatttaaatagatatgaaccttggactacttataatgataaatatatttcacatgtttataaagtcgtcaatgaattttcaggttataataatactttagcattttttgcaggtaatgaaattgttaatgataaaacttcagcatctaattcacctgtctatattaaagcagttattagagatatgaaacattttataaaagaaaatggtattagaaaaattcctgttggttattcagctgctgatgatttatcttatagaatttctttagctgaatatttagaatgttatgaatctgatccattagaaacaattgatttttatggtgttaatacttatcaatggtgtggtgaacaaactttttacacatctggttataatcatttagttagagattatggtgcttattcaaaacctatatttttctctgaatatggatgtaatgaagttttaccaagattatttaaagaaattggttcgaatttattcaaatcaaatgacaaatgttttctctggtggtttagtttatgaatttgctcaagaaccaaataattatggtttagttgattatgatgaagcaggtaatgttaaattattacctgatttttttacttttaaagaacaaatttcaaaagttaaagatgtaaaattatcaaagaaattacatttacaaaatcaacaagctaccaatggtaaaggttcaagaaaaacaggtcaaaagaataaagtttgtgaattacaatattctaatttagatatttcaaaaggtattccgagatcaatgggtctttcacttgttaaagtcatttaatgaacaaaataagggtaaatttgttgttttaacacaaagtgacttagttgctaattataaggtattttcgcctgatggaagtttattatacgaatcactttctgttaaacctgttccagaaccagttgctgatccagaggattcaatttcatgtgagtattgtgatttagaaggggatgaaaatggaaatgaaaatgaagataagtaagctaaagataaaatcaatgaagttccaaatccaatcattgaaccctgttataccttctccaattggtgaagaaaacgattcaataaaagatgacaaaaaaaatgaacaagaaaaaaataaagaaaatggtaaggaaaagaataaatcaagtaaaaaaaagaacaagaataagtcaaagaaaagcaaaacaaaaaataaaacaaaaacaaagaaagccaaaacaagtacaaagaagcaattaaagcaaaaacaaaagaaaattcattcaaaagttattgcacaacaagaatcaaaacttagatctaaaacaaaatcaaaatcagtttcaaaatcaatttcaaaaacacgtattagtgctatgaaattaaaaaaagctgatcaagaaccaattgtagagaataaggctatcaataaacttgagttgttcattaataaaccgacaaattcctgaaaatcatatcaacaacaaaaagaaattcattgaatcgaaacttatcttcattttctttcacatatattccctgttttttttaacctaataagtaaatagaaatgtatactaacattcaaattactaatatagcaacatccaaaatgaatccattattttctttgatttttggtatttcacttcaatctttacttggtggattgttttgaaattaatacaagaaaagtcttggaataaataatgtatttactttaaaaaattttgtcctattgcttattttgcttaatgtgtaagtacatttatagattcgataaatgaagtaatcgtttttagttagttaataaaaagccaatttaaaattcaatgaagttgatataaagtttataaaaaaattcctaaaatctagtaaacgaaacctaagattttaccagagacgtgctttctctttgcttcttcgtgatccataatacctgcagaggtagttaagataacgtaaccgaattgtcttgctggtaataagttatcagtccatttttcaatttcgttaatcttaacgttatatcttggttgaataacaccacatttgtttaatctaccgtttaattgaatgacaatcttaccggatctgtgatcatcaatgtattcaaattcaccaatgtaacctataatagagaaaaacaagagaataatgttagtattcagtatcatttggaaataaaaaaaaggagagagatattaaaatgtaacaatcaagtgacaaaatttaaacactgtgaaaagtacttaaattactaatcgacacctgaatgatattgatctcccggaaaattaaaagacagccagctactgataacaaaccaaaattattgaataattaagattcaacgtcaagccatccagttatcattccggtgtatgtaaaataaagaagacaaataaaagaatggaagaaagaaattgttttaatacataccgtgcttttgcataacagataagaatttgatgacaacctttgatgatggtctaataaggacttgtctcttacctgatttttctgcattgttaatggaatttaatgcgtctgctaaaactgaagttctggtcattttttaattattctataataaagaatgttagtatatcaaagaccctcttttttctgtatgtaaaagatttacataaaataaaaaataattcatattgtgatatattcaaaatagtaaacaagccacatgagtatccattaaggagtcatgagcaaatggaaattaaaataaaaaaaaacttttaacaattccattatgtatttgggtattatgtggcataatgtgcacattatcaacttattcagtttcaccggaaactgtataggcagatcaacgaaacaaatgtcaaggcataatttcaaatacattctatttgatttatatataggtggaactgggcttataattaaatttctaagtattgatattcatgatgtttgctaactataatggggatatctatcagtgttgaattgtataatacgtacgatgaataggattgttcttgttgaaagaaaacagttactgtaattctaacgtgaaaaatatgagcgaacactctttcttttatacttgcactttgcaaaaagataaaagttgagtgaaaaatttcagttcaacatgaatattacagagggcgggtaacttgtttcttattgcctgttcttctgtgctttaaagctgtatatttatatttgatggtatatatctaaaattggtatacattggtagattattatggatgcagggtccgaaatattccagcgtgtgaaaccgaaatgtgtggcattggttcaaatcacattttcagacgatacttttaataatactaccccaatagaaattacataatgcattgaatgatttggataaaacgttaattgatagtgtcaataatgctaataggaaatatggtgatgattttgttatgtctccagcattagcagattatataatggtaccattgagtaaaatattgaagaaagaaacaatttcaaatacagaactagaacacgttctttcaataatttacaatttacttaaatattcttggtgtaagaagggaatactttctaaagaattacttattcaatacataacgttaatcacattttttattggtggtaaaccgggacagttcgtatttactaaaaattcggatgaaaagtatttaaatggtattttatgtattaaagaacttttaaaaggatgtttaaacaatggacctgacttttttcgagaatataataatgaatactaaattcataccaactttagggttttttggtgactattttattaaatatagctaatgattctaatacttctaatgttaaaacagaatcattagagaacactaaatacattattccatcttattaatgatggtgaaatactttcaatgtttttccccggaactgtttcaacaattgctaaaattatcaaatcaaaaccacattctaatgtaattgctatgtcattcactacattatcatcattgacaaatctcacattttctgatttcgatctaaatattgaaatggaagatcaaattgactccttgaatgcattaaaagccaatataacagaatcatacaatgaagaagacatgcatatagaaattgatcttgaaaaaagtgttgatattagaatacctgaaaatattaattcaaaagagaaacgtcgaaccactaaatggttatcaagtacaattcctcaatttgaaaaagctttaaatataatacttaacattgatttagtcaaatatgaaaaaaatgcagttagagagtctatgtttcaatttaatgtgaaacttataagaaattgctttgtttcttgtaattcgttgattcctcttgttttacattcattggcatcggtatgttattccgattcaacgtatacaactcttacggtggattctctatgctatatttcagagattgattttttgaaaaaaatcataatacaacaattggactgatgaaatatatcgtatgcaacatgtacttttatctcctgattcaacgaaaattgtaaaattgtttcaagccattatattaaatattgaaattttaaatggttgtgcaggaatagataaaaatattttagatgatctattagcaaaaatacaggagagcatctcgttcattattaaactgaaaactgctgatgatgctaaaaggaaaatgccagtagaatcaagttttgaatcacatacaattcaaaatcaaattatgttggtcacctcacattataagttaaactcttttgaagaggttcaaaatgagtacttattttcatccgtatttactaaagaaactgagcacttgtttcaaaatttatttgaagttatatctaaaaattgtgcacagatgggaactatggataaatcattcaccacaattcaaaatggaagtaacatgattgtggaatcagcagtacatagttggatagcctcgaatattattaagtatgcaagtaaagcttcagaaaatgttgttgatgcgtttatgcaatttgatgatgatgatgatgatgatgatgatgatgatgatgatgatgatgatgatgatgatgatgatgatgatgatgatgatgatgatgatgatgatgatgatgatgatgatgatgatgatgatgatgatgatgatgatgatactaatgatactgaaaataaggaatcttctcttgtattacaaaacatatgctacttatcattggaaatttcagtcaatacactaaagcaatgttcatatctgacaccttcttcctacaacacaaaattatctactattatgtcactacgagcaatcgacaactctatgtcacttctcaaagaagactttgaggatgaattaattgatgtattatatcctgttgttgaatgtttggcttcaagtgatgaaaatattagaattgaagcgcaaaaagtttcattgaatattgcacatttactctatgatggatccattcaaaagatgatatcagaaaactcggattatttagttgactcattatcatctaaacttgttgctgaggaattaacacctaaagtgccaattattttatcagttagttgttaaacttggatctatggatattgttgctgaacttgatgatatcattaaaacgatattcacattattggatatgtactatggttataattctctagttgaaggttttttcctggtgtttgatgaagttatttcaaaagtttatgatgacttaaaggactgggattttgataaatatgcactggatagcgctactgaaaatgttgaatattttggtatgtggggtttaaaatcagaagaagaagttgaggaatttattaataagaaagctgaagttattgatgatattatgcaagatagtgatgatgaagatgatcaaaatgaggaaattttaagaaaagataaaatattagaaattgattctgatgatagtgacggtgaaagtgattcaaaatctattccttcagtaaaccataatgaccaggaggaggatgatgatgactctaagtggacttcacctattgagtataagctctacacaactatatcaaatatattatcttacgcagaaagattgatgcaatccaattctatacaattggctatcattcttctaagaattattaacagagtcttgccccttttagcaacacagtactcaaaatttttacctctagctgttcaaatgtgggaacttataagtcatactatcaatcataccgaagatttaagagtgatatcatcatgtgttgatattttccaaacgttagtcaaatatggaaacacttttttcactaccagatttattgatatttacaagactctaactaaaagcaagagattaagaccaataattgaaaatcaattaaagagagtcattcaatcacagaaaaataaagttgaatctaaaaaagttaattttacaagtacatctactaattgggagtatgaactattcaaaaagatttgtgaattcttagtctttgcattacaaaaattgggaagatttattgctaatgatgtggcaatatcaataatcagtattacaatttggtataatccaaatataaatgattatggatattttgatgaactagctatatttttatcttcatataagaatgagaattatgtagtttcaaaattaggtttagattaggattatgttataacacgtttgtataataaaaaaacttcaaataagtttataattaacctagaaaagacggtggtttacagattgataaacataaaagcaggctaaaagtaatcaaaaaaacaaaagacaaggtcgtacccggattcgaactggggttgcccggatcaaaaccgagagtgataaccactacactatacaacctttgttaaaattatttttttaccccattttatttttttaaatgtgttagtcacgtgatattaatttgaaaatatcaaaattgtggtagctttcttaaatgagattatttgttgctgaaatgaattttataagtgttaataggtatttttctttccacaacaatggttttcaagttaattaaattaaaaaaaattaaaacgtgtattgtaaaagtaattttgtcaaagaatacatgagaatattaaaaatattttgatctattaagagtaaattatgaatttataaacggtttttacttaaatctagttatagaatgcatctcttacagcagaggttgtgtctctgactaaattagcaccttgagttaatctttcattcataaccatggctgtatgctggcatacctttgtagatatgaattgtactttgaacaccattctttcttaacttagcatcataagcttcagcttccgaacgtaaaacatcacattcaccagcagcaataaaggaaggtggaacatttttaaaactttcatcaggatagaataaaggacttgattcaggttctgttaaagtttcaccagcttttggtaaatatatctttctgaaccataacattttggttgctggtaattgaggagttttttcattctctttccatgatttttgagtttcaccagttgcagaattatcggtaacaggaacaaccatcatttgaaatttaattggaggaagatctttagataatggagaagctgcatatttatgacaaattatagctgttaaattaccaccagccgatgaaccagcaacacaaaccttagtattatcaatttgaagtttagaaccttcttccataacatataaaacagattcaaatgcatcatagacacatgctggatatggatattctggagctaatctgtaatcaacagtgatgacaatacattttgcaagtgttgctaaatgggaacaatatgaattttctgtactaataccacctaaaacccaaccaccaccgtgaaaccaaacagtacatggccagccatctttaggcatttcaccctttggaacaaaaactcttgcaggaaattgtagtatctccttgttcttttgtatgttttcttggaatttcaatatcaaagattttttcaacttccattggtggagcttgacctggaataacattacctccagcctttgttttagcaacagggaatttatgagtttctaaaacatctggtctataacataaaacttcattaaagaattcaacatattcaggatcaagtttatcgatcattgaagaatctaactttaatggtaattctgaaagaggttcaggccagctgtaatcttcatttataatggtatcgtaaattgacattttggtttctattgataaaatgttagtgtttgtttaatggatgttttaaatgaactattcatccaaaaggaagagaacaccacatttatttataaaagtaacaaaagtgaatatccgtacatttactttagaatgcattctcatgataatgaaaaaactatagtggggggatttataggattttgttcacggctcaaatccaatgatctccggacattcacttttacacatcaaattcatatatctaaaatgtgtttccttttacaataaagataatgcccttgaatgctatattatgactagttctgatacaaagaatacattgttaagttggggggtacaacttgtaatcagcttcaatccatgaaaaaaataacgccccacaatccatttatttaatccgactctttacaaatttctatcctattattaaccactatcacaaccatatcttttacttatccgctattgccccttcaggtaactattctacggaattccctccatgataaagaactttccctaagaagtctccctccacccactatataaggtttgatggggggagtgatccctcttatctcggtcatcttatcagaaaatatttcctttttgggcatatctattactgataagctagtaaattgtgttaaaatgactaatgaaaagtcttttatctaatctaatctatacatcgtacatatcgtcacagagaacgtgttttgatccagcactccttttgatacagttaccaagtaattttgcatattctctaccaacttgccattcacaacccagataactagtctctattgttctaagtaatccaataagatgattcaatccatttatttcagttaatgcatcacaatatgcctctattgcctttttgtggctttttgcatccatatgattcaaactgctaaatgtattcccagttttctttgttaaagctgttctaattcttcttaaataataacttccatcttccatcgctggaatgaatccacttttcaattgttgtctaggatctggtgatttgaacatagattcaggtccatatacatgaaatgcatatgcccaaagtgataaaattgcagatatgatgacatttggtctataaataaatgggtctttatctggttcataataatagttaacagtttcaacagatccttccggagatagtaacagttcacttaacaaaatcaatgaattaatgacagacaatttcccgtcaccctctttacaccatttatcaattcttttgacaactgcctcataatcctctggtaagatgggaacattcattctcttaggagcccctgcaaaaacaatataatcatagtgtgatattcttaaatatatttgtgcagcatgataaacaggaaatttacatctggtgtcctctggcatcaatgatggtggtaaaggcggtgatgttgcaccagcatagtatacacttgataatgtcaagcagcaatcaccatccggtaattgagatttccatgattttatagcagtggaaatttcattcctccagtttttttcaaatgttttccatccaaaatttgaccattgtgaaatattttgttctatttgtaaaattagattaatcagtccagataataaaatttgtctaccaaatgaatcaacatttacttgttctcctttaagcaaattttttaaagcattcagaaaataatggtgtttcaacaacatgatttgaggctttgtttctatcaacatttttatattcccaaatattatctgggcatggtaatgataactttatttgatttgcaaatatactcagaggatgcccaaaaacaattgcatgtatagtatcaatattaaatgacatcaatgctgcccttttcatagactcactttcaatccaagtatcccatagatttatttttcgactcgtatcagatccatgacttttcaaaggatcaccacctaagataggacttctccttaataattgtattttagttccattgtatatacaagctctttcatgtaatgatcttttaggacttataatttcgtaactttctaatataattaaactttgaattacccatgatttacacggtggtttcgcattttcatttgcaaataacagccatcttaaaggttccgcaatagtaattgctaaattacttggattctgtagtcgtataatgtccggtattgtaacttttttggctaatgatgcacctgtcataattaaacttaaaagaaaaagggggtgtgcctcacttgtagaaaatgaaggtctatggattataggatattgacaatgatataatgaccagtaaagttctaaaaaccatttaattttaggaattgtaaaatctggattatttttcaactctggaatatattggatcatattattaataatcttttcatcaacttcagtttgacaattttcattgggaaattctggagataatgcaaaaactttttccagcattgaaatggtattcataccaatcggatcttcttgatttgtatgaaatgcaccatctgaaatttgatccaaatataatgcgcttgttggggatacatcaaggggattcccgagaagccaatgaacaatttcagaagaatatataggggtagtactcgatttattgtgatcaacagagttattttcaagtttctctaggtataattaatactcctatgcgagcttgttatatgttctggaatactattattgagttctttgggagtcaaattactcgatgatgatgaatcaatattgttggagattccgatattactcatatctagagggagtatattatcatttaggttcttgatattttgagttgtagtatttgtccaattttctcctgaataatcttctattacaggactacccgagatatcattacctgcttgaccaatatttgaggatggtaattcctgattcgttaaaccatttgaatttgaatcattttcattttccgacaaaacatatccattattgttattatactgataaaacgtagtatttggcttattatgtgttaattcatgtttctttttaacatccaatctggtaaatcccttgtcacaaccaggaaatccacaaacatgtctctccgttgaatgaacaacttggtgcctcgttaaatgatctgatcttgagaatgattttccgcaaccatcaaccttgcaaataaatggacctttacctctctttctcttcttttcgatggacacagtcatgattccaagggaagtataagcctttatcaacgattgtttccctacaggaaaaacctcaatgattccggtcttaaaattgtaaaagtcgctagataaatgttcatattacctaatatagaaatgttattactggaaccttccagaaggataagtaagcaagatgattactaataacaagcacatttaccatgcttagaaggtaaagacagctatctctcctacaactataaatagaggtcctaatcccctataccacgatgtgaagttaggaatagtcccttatgaataacgaacgaacaacgaacgatcaacaaatctaaatgaacagctattgaacatctacaatgttcaattagactttcataaggacatcacatcaatacaatggaacatcaattactttatactttatataagaactaccatataagttaactaaacatttatatttaaacatttattcaactatttattatacctagtcacacgtgagttcaccctggttaatgtgtttcgtcggaatcaaaagttttttttagcttcacgaaattttaattagtagggtgaatttttgtgtcatattgacgttttttctttgcaaaaaaacagtgtttattatgtgtcatcagcgcagatatattaataaaagagatgtttatattgtaaactaaataaatgatgaaaaataattaaaagaaactaaggggaaaaactgaaaaaaaggatgtaaaaaagctacagaaaatgaatatttaactatttctaatacatccatctgtatttaggattacttggaccatcataaagttcagcagttggaacatctctataagtatgattaacaccttgttgtttgtttctacgacggttatcaaaaaccatgaaaagtaaaatacctaaaaccattaaaataccagcaccaccgaaaccagcagtaatacctaatgcaggaacgtattttggagcatcctttggtctgaaaatgtttgttgcaattaaaccagcagcatttgcaaggggaacaccaacagctgagataactacacgacgattttcatttggagtattgttattataccaagttgaagttaagacagatgaaactgaagcaccagttgtcattaagaaacaactaaaatatgcaacaccaatatgagattgtgtatcgatacacccgaaaacaacaaaaccaatcaaagtgactataagaccaataacaataaatatagatctgacacgtgttaaatcagaacagaaacacaaaataattaatgcaacctgcaccccaaacatttggtgcaacagtgtataaattggtcataacagtacctttacctaaagaaccaataatttgaggaaaccaattattaatagcatttaatggaacaccaatgaaaatttcttggaacatccaagcaatacagacaggatgtttgaataccttaattgcatcacggattgatactttttcagcttgaacagcagaagaatcaagttcaattctttttctagcacaaattttttcttcttcacttaagaatttagcagaatctgcacttctaggtaaataaaggaatgcaaatacagcgataataacagttgcagccccttcaattaagaataagatttgccatccatgtaatttagaactatcaatttggaaaacaccgaatgataaaagaccagaaaatgcatttgcaatattagcagctgaataaaaaattgataatcttctagctaattcatgacgacggtaaaaagtacttaagtaaaagataatacctgggaaaaatgcagattcacatatacctaagaaccatctagcagtcatcaaagatccataattgaaagttgtagcttctaacatactaattgcaccaaaagtaaacattaaaattggaataacatttagcagcattatatcttttaataactaaagctaatggaaagcgaataaaacgaatgggacatagaagatggataacatattattccattgctgaccaacaatacctaaatcttcaggctaaaccatcagttttagcatttgaaatgttacctttatctaaagcattgaataaatacataattgcaagtaatggtaaaattcgtaaatcaaatttccaacataattttttttcaagatgtggatcaatattataagtttctaaaatttcattatttttttcttcaattgaagcttcttgatcaatagagataacatcgactgattgatgttgtttaatacttgagcccttcgtatgttattgtccatttcttggtttgtctctgatgagcttttgaatgattatagtcatgatagaaatttaaaatttatatttaaaatgatgaatgaaatattgagtctagtgaatgaaacttgaacctttataaacaaaacgattgatgaaaataaatttatagaagctaaagataagataaagcaacaagtggtacgttctatctatttcggtgttagataacaaataatgtatctattgatatgataagtgacattaatggtgttaataataatcaagataatgaatattcataaaataacggaacaatttcagttaccactataaatttcagggtcaacaaaaaaaaaaccgtcggtccccccactccgataagcctaatacagtaagtgggggcatgtgtgattatgtaagcattgtggggggagttgtctattttcttatcagttaaagtaacatgtctatattttctaaagtctatcttatacagatttgttacatgagaaaggaattcaaaatttctacactgtaaacagcatccagtccaagatcaggtgaagaccatgcttttctgtagaaatcaggcaatttcctaaatgctacaattccaaataattctcttaatttagtcatcttctgtaggaaaaaattcttgatgttcttttttcaaagcacaagaacctaatactgccattgcaaaaacaagaactgtatgaacattactgtgaggacttagatttttaaatgcatcacaggctagctgtaatgtgtgttgaactagtacatcatcagtttgaatttcaggattaagtaatttggaagaatagatgaaaaactgctttggagattatttctgctgcataacaactctccaaaagtttcttttgaactgtctctggctcgttacaataaacatcaagtggtaagattggccttgtataatagtttgcaacttttctaatctgttctaatagtttcctatgttttggtgataatggagtaaaaaaagcaatccaacatgcttttgcttgtagttcataaactggtaacgcagctccagcaacagggtgattcatccacggtacagcacatttatacaatggttttgataaataatctttcaatgcttcaaatactatgaaaggtgaagtgatttgatttataagacttctatcacatgcaaataacatactagtatagttgaaaacaaatgattccaacatggttcgttcatagggaaagatttcaattttcattattattcgtcgatttattgttcacatcaaactcatgaaccagttcattgtttaacaacgtgaatatttgagtttcaaacgatgtggaatcaagttttgaagtgacttcagttgataaggatgttttaaaaggagttttagctaaaaacaatcgacatttatttattatatgaacaaacattattctctgttgagttataattttgatattgttcaggcgggaaaaaatctgctggattatttatatcaatatatgaagcttcatcatcattcattactctaaaagtgttagctgttgactgaagagctttccatattattagcaattccgaggattcatcatccagcacaccataattttgagaatctaattcaaccacctccggagcgttattaaactttcttcttcttgcacaccatactttaatagcttcaattgctgcaataatacttaaagtagtgtattacttgactttcataaacaaatcttaactttaaatgaagtaaaagtaaataaataattaaccaagtttcatttccttccagattttgactttgtaaaaatgatttaacttcaacaactgaattatttaatttatcatgacataattgtaacattgtatcattttttgtagttgcatatacaaaagctgcaccacaagaaaaaaataagttttgtaacattggattttctaaacctgttggtataaatgctgaacctggttgaagtttgaaatgtgctaattgaggtgaaacttcaatcataaatccattaacaaatgcattatataaaagcccattttcattatgtcgatttgaattctgtgacattgaaataaacccattagcaaatgttgaattaatttcaattagaacttctctaaacaaaaaatctcgtatttcaatctcagattgattttgtttattatttttaactaaatatgtttttccttgaacaagttcaattttttcttcaacttcttcggcttcttgttcatttaaattctctaattcattagctatttcaacaattttctttgtatctgtacttagtgtagttttttcacttaaactattttgcattaacattggtgatattttttgtggtaaatgaaccaaatttccactcattgaaagtggaggttctataaatgtttgatttgacaagcctatagcattttcagacgttaacttattatcagaaacaatattgttaaccttttcgacttcttcagtttccagtggtttagcaagacttgaaatttttattggtttaaaatctgtatcatgtgataaggattgaagtccagatggccagacacatacatacccagacttttgacaatttgaacaggtaggtttgacaccgatacatttgattcttctttttctacaacagaaacaaccacttttttttctttttttaccatcacttgtacccgttggtttatttattgtatcgggtttattagcggaattccctctcttggaacttgttggtttcttgtctgcactagtaactttaaattttgtgaatagagcacttttcattgatatattaagaaataaaatatataagagtttataatatagtccatgccattaccactcaggtatgtttcacacagataaaattcgaacctaataataatttaattaattaattttttttcaccttccaggataagcttaaattttcaataaaaatcggagattaaagagaaagttcgcgactttagttaactttcttatcgaagagataagagatcaaaaacaccagccgcttttccagcttgtattacggctggtgcctattttaagttatatactactgctacttctacttaatatctatctttatcaataggtatctttataaactaatgcaaatatctatataaatatccaactctatacaatgaaaacaaaaaaaattctttatttatgctctgatgatttcttcaataacttgagatgccttcactaattcttcatcaaaccatctcttaccggttaattgtaaactaattggagctccagtgaaaacagttgcatcatcatataatttatattcatattcttcatcttcatttcttggaacatattcagtatctggtttatcaagttcaggatcacatttaagaccagttgggaaaacaacattagggaaatctagaatattccataaacttgtgtacccccaataatgaacagtttcatgaactggtgcaactgaactatataatggacaaagaataaaatcaacatcaagttcattcatttttttcaaatatgcggttctagttgaatctcttaaacctgcattactttgatattctgaaacactttgaccatcaaatccacatccaacatttaattgccatttacttaatttaacaactggttcacctgataattttaaaagacttaattgaccagcatttccgtctgcattataaccattataacatgcttcaacaacttctttaacattgaaggattcccattcaacaactttaacacctgcttgttttaatttttcagctgaatgttttaaacctctaataattggtggagttggtttaacaacaccatcatcataaataattgcaactttaagttcctttggggttggagtcttaacctctctccaaggtaatggaataacagttgcatcagtttcccaaggttttgaggataattgaactttcataaataattctaaatcttgtgcagatctagctaatggacctaaaacaacaacaacattttcttgagttttattaccacttggaaccattgggaacattggaattctcttttgtgaaggtctcaaaccccaaacaccacaaaatcctgcaggtgctctaattgaaccaccaatatctgatccaagaccaaatgctgaacctttcattgcagtaattgcgccttcacctgatgatgaaccacccggtgttaaatttgtattgtgtggatttttagcaagtccagtaatattattatttgaatctaaatgcattaacatttgtggttcagttgttctaatataaaaaactgcaccagcatcatataaaatttgaacacattgatttgtttcagttgaaacattatcaattaatccaacataaccaccatgagtaattttacctttataatcataatgttccttaagtgaaactggaataccatgtaatggaccaacagttgttttagttttcttaaagatttcatctaattcctctgcacgctttaaaccttcatcaatgaaaatttccattgcacaattagttaattgatgtgccatagttgcacgttttgcataagctttgaaaacttcaactgatgaatattcacctgatgcaattttatcagctaaatcaattgctttcaattcagtaatttcgatctctgatttagttaaaactttctcaggaatcttagtaacatcaaaacctaaactttgtggaattaaatcttcaggtaacttataatcatctaagatattgtcatttaatgcttgtctatatttttcaatttttggaataaatttttcaaataatttgatatcttgtgggtcaacttttaatcctgcaccgtcaatagtcattttggttgtgttgataaataatataaacaattatatgaagaaaaagtattaaacctgaaaggaaaacatcacatttaaatagtacatattacttgggaaaaaccacaagaattcaccatcaaagttttacaattacaaatcgacttcttatcagttatcaaaattataaagttttatcaagttgataagtatactcgaggtattattagcactcgcctaatttcaaaaatttcctaaattggacatcgtaccttgatggtggacccaaatttattggtatatcaaattcttatcggatctcggcaaacaaggctttttatcaattcgagcttgccttatattgcaaaaactattgttatcagagactgataagagtcgccaacttttgtgataatttccgtttatggataaaaattttcgccaaatgataagcgataagagttgactttcattttaatgtgctaacgtattgataagattgcagataaagttccggtgtccttatcattgaacaaaggaagagatccaaaataaaaagattgtacatgttcgtatcatttttataatttttggaaactataaagtgagtggaaaagtatctacaattctaaaaaactattttcttttcctaaatctacactaaacaagaaaacaaacagactttatcatgagtcaaagttcagttgaaaaaaagcagaatgattttaagatagatgttgagcaaatgtcagattcagatggaggacagctagaaattaatggtaaaattgattattcagttgtaccaggtacgtcaaatttagttgatatcactaaaactggttccaaaaaagatcaaattgttcttattccaactccatccgatgatcctaatgatccattaaactggagttttagaagaaaaatggttcaaatgttttgtatcattttatattgttatggtggttcagttcctggatgttgtatttattcaattctgccacaaattgcagcagatccaaatgttaatataactgtttcagatttaaatgcaggtactggttattcatttttatttttaggtttgggtaatttaattatgttaccattagcacagcaatatggtaagaggccaatctatttattaggtcttttaggtgttattggatttaacatttggcaaccatatattcatacaaatggtgaatggattgcatcaaaaattttgaatggtttattttattgtacaattgaatcattacctgaaattacagttactgatatgttttttgaacatgaaagagcaacttatatgggtatctatggggcagcattatttagttcaaattatgcagcaccaatgcttgctggttttgttaatgatgcattaggatggaaatggacaattattattgcagttatatttggagctgtttgttttgttttaatgtttttccttatggaagaaactaattatgaaagaaagattagagttaataaggataaagatggtaatatcattggtgctataacatcaaatgtaactgaaaaccataatttattaaataatattgagcctgttatttcaactgttaatattggtaatcaagcaattctagttgatgatggaattagtggtgaatatccacctgagaaaacttttattcaaaaattatcattaacctcaggattcaaaaaagatttccatttatgggattatatgattgcaccattttatatggtacaatatccaatcgttttatggtcaggatttttatatggatcatcattattttggtactcagttttaaatggtacagaagcattaattttaggtgctgaaccatataatttttcagctgcaatgtgtggtttagcatatgtttcaccagttatttttgttttcttaatttacccatatgcaggttggtcaactgattggattaaaattaaaattgctaaaaagcataatggtgtttcacaagcagaagatagattatgggttttaattgtttatatgattttaggacctgcagcattaattttatggggtgttggagcagcacatggaattcattggattggtattataattggattaggtttacaagcaggtctttgtattgttggatgtatttcatcagttacttatacattagattgttatccagagatgggagttccagcaattactgtattagttataatcagaaacacaatgaattttgcaatggattatggtattacaccatttgttactaatacaggagttcaaaattgtttcattgcatcagctttcatttgtttattctgtattagtacatttttcgtcatggttaaaacaggtttcttctggagaaataaacaaaaggagaaatattggaatttagttgccaaatatcgttccaagggtattgaactttagctgctttgaaaaatttttattaattctatttagttatttataattttgtatagttatatttaaatacataacatttctaatatacgtttttttttcttagttccggtgttagtcattattacaacgctcttggataatcctggattgattattgccaaactttcagtattatttaagttaaaagtatcttcttcaagtttaccatttattggtatttcactatcatacatctgattagtgtcgtgattttcattgcttggcctgtttgaagctagttctatattatcaatattgctttggtcttgagctagttttgctaatttattcgcatatacagcagcaaaggcatcaattaattaataattattctagttgtttgcattagatacatcttcagatttaaaatcagtggtaattggttcttctttattatgtttgccatttgtagattgttgatcattattttgttttaaaaagaccttgataaatagatcctctggaactgtaggttgcttttcatgtatgggtaatcattttcagtaacacaatcttagcttcttctgaagattcctgtgcactttctgattcttcttctctgggattttcaaaatctttacagccgttatttatttcaatggcagaatcatttttaggggagataatccctattcgaacttctgcattcccttcggattgttctttgctgctactttgttcaatattccttcatcagattcactagtactagcagaattgttttctccaatagcttgatattgaacaccttgagttttaaatttattattataagatttgaataaaaggtcttggggttcatcttgtaccatttcattttccgaaatctattgattactctctttgctgtgacttatattatgatgtgcaatttttcttccccttcatcttttaaatcttccatatatttttccatttcaagtttcatatctttatcactttcttcttcttgttcttcagtttcattatcaattttttgattaaacatattgattgcgtctttatcatctgagtagtttctgatagtgtatctcatcttctttttcacctttcactctcactttcaatcatgattatacttggttctagatgtagcattagaatctggatgactgatattattatcactatcttgttcaaacaaatcatctacggaaagtttgtcagtacctcaagttgttgataatcatcttctttttgctcttcatattcataaattttttattgatattattagaatctgtattttgcttaatttcttgaaaatgatcaattaagttagatatgcgtttttcttttagttcagcatttaaataattttgtttgttacgtttattaatcaatttaaatttacgttccaaattgttacagtaatcatcttcagctgtctgaaagtctttctaatataaatttgcaaacttgctacctgccactccacggcacactctgctaccactccataagcgcacaaaaaaatttgtggcatcgctccacttcagcgcggatactttatttatttttcacttacgtctagttacatgagtttacctatttgctaaatttagcattcttttccaatgagtaacttaaaaattgtactcgtaaatcaggtggtaacattttgctattgttaatttaattctcgtaattgattagattaacaaattgtggaatttaattggacaattgtatcaatcatgtcaaagtatatcttaaaaccttaaaaagctaggtaccgttttgatgtaatacctcataaattaaatgttttagtctacaagtataaagatcgacgtttttctcttttgtgcatgtgtaatgtagaatcaccaagacccaatgtttttttaattttattctttagcgtcgatggccaattaggtggtatatacagtatataatataataagagtaataatttaaccacaagatatatacagtattattctcatagcaattaacgaccttaactatatcggctattaaagtacggtgtaaagtggaaaaaaaaagcaaaaactaaacatttaatagagtatatagagcaaacagccgggatagttgaggtcgctcattgaatcagtgtaatataaataacaattgtgtgtaaataacttgtatattaaaatctgtataaaaccatgcatgcatgtgcagaaatatgtcagaaatttgtgtaattgaagttaatcaaatagacaatttgttctatatacgacattacgtaatatatccggaaattcatcaagatacttgagccttcaaaaattaaattacgtaatgtgatgaatcaatttttttcagttttttctttgtttacattttgcccgattaggcaattttttttgttcattttttcgattcatcattaaatcagtagaatatatggttgtagtttttgatgaaaaactggaagaagcagaatttatcatgatgggcattcttttgctaagaaaactcaataatggggaggtgtttaaaaactagtaaaccaagtgtacaaaataagacaagtaagactaaaaatgatgttaaaagtaaaaaattatgtataaataaaagtaaggtcaagactactgtcaaaacgacaactaaaactaaggctaagaccaaggtaaaggatgttaaaattacagttaatgaaatgagagatcaaatatctaaattagcagttgatgaaactactcccggtctgaaatgtatcacattagcagaattagacaatttaactgatataaaggataatattttaaaaaaaattaataaaagtaagaaaatgattgtacttacaggtgcaggtattagttgtaatgccggtatacctgattttcgatctaataatgggttatataatcaaaaattagaaactgaaagcaataataataataataaagaaattacaacaacacagcaacagaaaacagtaattggtaaagaaatgtttgatatttcagtttatagatcaattgacacagttaagatatttaataaatttatgtttaatctatatcaaagtgttaatcaaggtaaatatactaaaacacatcaatttattaaaggattaaatgataaaaagaaattaatcaaatgttatacacaaaatattgatggattagagagaaattgtggattaagaacagaatttgaatgtaatgaatggaaaaatattgatgttattcaattacatggagatttgcatcaattatgttgtaattcatgtaaagcaaaattttaaatgggatgaaatttatgataatgaaggtaaaagtaagataatacgagaatatgaagaagaaatagaggagaagtttacaaatgatgatgatttaatgatagttgtcacaagatagtagccaatagtaacaatagtgataatagtgaatcaattttttcaaatgatagtgatggtgaagatataataataaatgaagaagtagaaatcaataataataacaataatgataattcatggaattgttgaatgtccctaaatgtatacaagaatatgagagaaagatcaagatgggtaaaagaagtttagaatcaagtattggtataatacggccaaatattgttctctatggagaggaacatccatttagtgaaacatttggtaaaaatttaaacaaagatttaaataggaaacctaatatattattaatatttggaaccagtttaaaggtaagtggggttaagatgttagtacgtaaattgagtaagaaagtacatgaacaagataatggaatagttatattagtcaataaggaaccagttagtaaaagttcatggggtaaagtaattgattatcagattatcagtgattgtgatgccttctgtgactttgtcgagggtgtgaaaaattgatttattatttgattttatcttatgataggcttttcatgatttcttttattttttttattttctttatgtattgtatattatatctttaagtaatggataaatgatgagaagagtttgagattagtgcatttacagaatatagtacatcatttagataatggagtattgttacgtaaaacagtggggagatttactcaagatatgggaagtattgactctagagagatgattggtgaattatgtaaaatatgtcaatgtgtaagagtatgtggtataacagagaagagaagattgatttatgtgaaaagggagagatatattgaacgattgtgtagtaattgtggatataaagaacgagagaaattagagaaacgaaatagaagggataaacgagatgaattgaggaaagatgtagttataccagttgcagtgagtaaggatactaaactcaataccaagaccaacaaaccaaaaaagaagaagaagaagaagagtgcattagctgaactgcttgcaaagaagagagagagcagtcaatgctaatgctaatgctattgctaattctaatatattcccgagggtccgagcttttttagaaaattttaatttttttccataacgtttaacttaactaacttagctaatattttctattttctattttctataatcgttaatttaactgacttttcttctttcaccttcttttctgatttcattttattacttttttagttacttctttctttatccattctacctctaatatgcctaaggatccggcattcccgcccgttaataatttatcacctgctcaacttgataatataactgtaagtaaaaaatggatcttaccaccacgtccaaaacctggtcgtaaaccaacttctatggtaaattctcctgaaggggaaaatattgaaattaatgaaattactgaaattactgaaattactgataatactactatgaataatttagaacatactagatcaaattcaatttcaaatgttttatcattaaatccttcattagcttcaactgttgtatcatcaccaaatttatcatcatcaattaattcaccccattgtcttaattcaccaaatatttcaatctcaaatctttcttcaccatctcctattcctattaatgttaatactaatggtgaattatctcctagagaaagacctgttgcaagattatcgaaatctcctaaaaaggataaagaaattaaacaacaacaacaatcaatttcaaagaaaaaaacaatacagttagattgttcaattatacataatcctataaagcaagaaattttgaaaattaatgaagaaaattattatttaaaacttgaagttattagattagtttcaaatcttaaatcaataagggaagaaatttcaactaccaagaaaaatgaaaatgaaaatggaaatgatgttgccattgataataaaagtactaaaaataatgtaaaaaataatactactactgaaataccacctaccaccaccaatgataataatataaaagaaaaaaataataaaagtagtactttaaaaaataacgaggaaaaacaaaattttaaaccccctattgaaccccatattaataaaatacccgataaagtcaattcaaagaaaagatctcatgatgatgatattaatgatttaattgtatcactgattgatttaacacattctcaacaaacaaaattagacaataatagtattacaattaatgaaacccaaaatgaaaataatgaaaaagataatggaaaaaataatgaacaaaataataaaaaaagtaacgaaaaaaataatgaaactaaaaatgaaattaatgaaaacaacagcaataataatgaacaaacgaatataattcccgatatcaatatgaaaaatatcaatatcactagtatagacaataatgaaagtattacaccgatgacactgattgaaactacaactaattcaccaatgaataaactgatatatgaagaagatgattttgatttattatctacagtatctacgactaatagtacagtattctcatcatctcaaagtatatcaaatgaaactattgatacattatcgtatagtaatcatttacatagtaataataataataacaataatgcaagtacattagataatattgatgaaataccagcatttcaattactagatttaccaaatgatttatcaattaggaatggtaaaatgaatattcaatataattatgaaattccactaattgatgatttaaataataatgataaacaattcaatttattagatactttttcattagttaaggaaaataataataaatttgaagatttatcaacattaaaattacttgattttaatgaaaatctactcaattataatgaaaacgatatgaatgaatttaatgatattaatgatataaatgatatagacgggcttaataatggacaatcttccactataactttcaacaatgaaaatgatgttgaaatggaatttgaaaactttgtcaatggtactatattctaataattatgtgtagaaactactaaataaacaataataataataagaacaatgtattccctaaataatattaatcttcaaatgctgagccgagtatatcggcccatcgacgcgaattcggagtgcacgtgtctcattagtagctaataaataattagcattaacattttatgcatcttgaaggctctggttgacagatttcttagatttcttgtagctttgccatctgatcttcttttaatttacgattataatcatttcatttattaaataaccattcagtcatgaagttcggtaaatatcttgctgcgagacagcttgaattacctgaatattcatcttattttattaattataaacaattaaaaaaattaataaataaattaataaatgataatgatattgaaactggtaatgatagtgataataataataataataataataataataataataataataattccaaattatcattacaggataagaaaggttccttcttttttaaattggaaagagaattggaaaaagttaatgcattttatttagaaatggaaagtgaattaagatttagattagatttattaattgaaaggaaaattaaatcaatcaaaaaaaatttaatatttaaaaattcaattgttttcatttcacttttcgatggttttaaaaaattttcaaaagatttagatagattagaacaatttgttagattaaatgaaactggttttactaaagttttgaaaaaatgggataaaaaatcaaaatcaaaaacaagggaattatatattacaactgcaattaatgttcaaccaattttccatagaaatcaaattgttgaattaagtgatttagttgctaataatttattagaattagaagctttaagtaatggtgatgataattttatacgatataatgattcaaaaaatttaaatgatgatgatgatatcgttaataatgttgataatactaatttaattataagtcattctgaaaaaaataataataatgataatggtgatgatgatttcaattcttatgatcaattatatactgatttctatgatattacattacaaaatgcgaatttaccaactaatgaacaattaattaaattaaaagattggtcaaatcaaataatttcaaaattaaatactaaaactaaaaaattaacattttcaaaagttttccaattattaattaaaaatttacaaatacctgatgaatcaattttacaattttatcaatttttcaaagaatttattgatttaaattttgttgatgatcttaatggtagaaattgtattattgaagcatcaatttgtaagactggtagaaatgatatttttaaaacttgtctatattcaactattgacccttcagttaaagattttattggtagatctccattacattatttatcagaaaatggtagagatgatttattaatcttaatcttagattatataaaggaaaattttaatgataagttgatttcaattattgattctcatgataatgagtcaatttcaccacttttacttgcaattataaataatcatcaatcaactgttaaaatcttattggattataattcaaatggtttcccaaaacaaaatgatacaaaaccaatgtatttaccattaaatattgcttgtaaatttggtaatttaaatattgttcaattattattacaaaaatttggtacagcagaattagcaaaacaatctaatttattgacaaattcatctcaatgtaatgccgaaggtttattacctttacatattgttgcatcttcaagaaatattcaactggttccgttattattggaatatggtgcagatattaatcaacttgataaattaaataaatggcctgctattttttattcagttttcactaatgataaagaaatgactaaatgtttattaagttatggagccgatttaaatatttttgatgaagataattataatgctttattctatgcgatgtgggagggtaatatttctgttttaaatgcactattagattctttaagatataataaaaaattatttaataagaattcaaataatattgatattagtaattcaaataaaattttgaaaccatccaagaatattaaattcttatcaacttcattaccaacacactcattagattctaattattgatttaaataatattgatatgattccagaattatcattacctccaccaattatacctttaagaaaatatggacataattttcttgaaaagagaattttccttaaactttcatttttcactaatagatattcagttcatttattacctgatattttccttacatcaatgccgggtagaattacagttagtaataatgaattaattccaagaaatttattattaccagttttagataatgaaaaaaatataattttccaattagattcaattgatgatgaattatttgaaattgattttgaattattcccaacttttggtacaagattattagcaaaggcaactttaacatcatcaattttaaaatctcaatatcctggtttaggtattaaaaatactggttatttagaattaccattattagatattagattaaagacaattggttcattaaaatttacttatgaattaatttatccatattctggtaaaccattagaaatttcaatgtatgatacatattggaaattgagttcatcatctgatgaagataaaaagaaagaatctagtttaacttcatttgttacaagttcatcattaaatggtagttattatactgtaaatgttgtttcattacatgatggtacaccaattatttgtcctaatctacaaattgatattggtaataatgttaaattaccaattacattatttaattatcaacaattaaaatcaattatttataaaaataatcaagatgaattactgaatgttaagaatactttacaaaatttaaattttgaaaatttgaataaatatttcaatgaattaatgtccaaagtttatttaccattaaatgaatttttagaactagtcccatcagaaatttcactaaatttagaaattttctatccgacaacttatgaattagagaattatgaaatgaaagaatttgcatttttatcaaataataaaattgatgaaagtaatgatactgataataacaataacaacaataataataataataataatagatcaacagttaataataatttaaataattttattgattcaatattaacagatattttcacacatgttagaaaattaagaaataacaataattcattacattcaagtagacaaattgttttatcatcaaataattcatatgtttgtactatattaaactggaaacaagccaaattatccatgttttctataatcttaatggtattaaatttgataaaaatagtaagaattttattgaatgtacagcaaatggaattttaaaggatgatttaagttcaattacaatttctaatgataaagaaaataaatataatgatattaagaataagatattaattgataatattgattcaattaataaagattcaacagaatttacaaatttattagattatgatgataaattaactagatcaattaaattagcagttaattttgcatgttcaaataatttacttggtattacaattcctgaacgaatattgaatttatcaaatgaaattgttaaatcgattaaatcaaagggattaattttagttgcatcaagggatgatgatataaatgattcattattatcatttaataatcataaagattatgaaagtattgagattgataatgaaaatgataatagtaatgaaaatgatgtagatgatgatggattaaaacatttagaaattgattcagatattcaaggctaatggtattcgtaataacaatgtacttcaagtttattgattcaattgaagtatgaaacttgaaataataataaccttttgtataatataaagtaacatttaaactaatactaatgtgctacaccttcctaaataggaaactccagacgaattactcactcaaaataattctcaaaatcagaccagttccgcagttctgataaagctccgttatcatgtcaaaaaaatatttctaatctttaatggttgtattgattatttcatcttaaataatagtgtctatgatggcaccatattctacacgtctctaccttcctaatgaggcaggtgtagctgttggatttatcttttgttgaacttattttgctctatcaatgttatacctacataacatcaaaatgtctataaaaggagcacatacccaatgttaaattgaaaaatgactagattgtatatattctctatattcaaacaaagaaacaaaaacaaataaataaataacaataaacaaattataatgacagttacaacagaatctcaagttttccaaagagttatctctgaaaaagcaccaattttagaaaaggcagatggtatgtatattactgttaaagatccaaaaactggtgaatcaaagacaattattgactgcaatgacaggtgcagctgttggttcattaggtcatcaagatcctgatattgtcaatgcaatgattgaagcagctaaaacttcaaattattcatttggtcattatattggtaatgaagcatcagaggatttatcacaatttattattgatcattctccaaaggatcattttgcatcttgtttgtgggttggttcagggttctgaagcaaatgaaaatgcaatgaaaatttgtaaacaatatcatttagaaaaaggtgataccaagagatttagatttatttcaagatttaattcatatcatggtttcacaattggtgcattatcaattggtgatggtattagaaaaaatgaatttaaaaacattctattatctgatgaacaaactccaaaagtttcagcttgttacacttatagaaatgttaatgaaaaatttactgaggaacaatatactgaaaaattattaaatgaattagaacaaaaatttattcgattgtgatccaacaactgttgcaggtgttttctttgaaactgttggtggttcaagttttggtacatgtccacctccaaaaggctatttagatggatgcaaaggcaatttgtgaaaaatatggtgcattattctgtcttgatgaagttatggttggattaggtagaaatggtaaatatcattgttatgaaacatttatgaaagaaggtaatggaccagatattatgactgttggtaaaactattggttcaggttttgttacattagcaggagttcttatttcaccaaaagttaaaaatgcaattgttaatggttcaaatatgtcaaatggtgcacaaacttatcattgtcatgaatttaattgtaaaattggtttagcagttcaaaaaaaattatttaaagaaaatttatttgaatcaggtgcaaaagttggtaaatatatgatggaaacaattgcggaaaagacaaaagattccaaagttgttggtaatattagaggtttaccattatttttctcagttgaattttgtgatcctttaactaaggaatgtttgaacaccatcatttggattctgttataaagttcaaaaacaatgtttagaaaatggtattacaagtatgggatttcaaggtacagctggttctacaacggatgcagatggtaatattattggtcttggtgatcatatcagtttagcacctgcatatattattactgaaaaggaagctgatataatcattgaagcatttgttaagtcaattgcagaagttgaagctgaatactttgcgaagcaaataatctactttttctgtctgtgtaactgactaactgactacctgactaactaacttttttactgtataatataaatttataatcaatctgctatcccataaaaataaaataaaaaacattttcaaaaaagtacccttttttcggctatttctttctttattaagcccttacgtaatcactttctcgggtattttaaggcaaggttaatgattccatcaatttccagtaaaatggatcacaatctaccattgaagtgaatcatcatagaaatatatatcttctaagagttaactaaagctacatgtttatatagacatcacataggaaaaaccgaacatgtcagaaccgtctaaaaattcaaaatttatccctggtattacaggtgatattgaatataagaatccaatattcacaatgccatcaattttacaaccatataagattggtatattatcatatagtgcatcattattagctacatttgcaggttatccattagattcactgaaaactagaatgcaaactcattattataaaaatgcattacattgttttaaatcaactataaataatgaagggaatacttaggtcttttcagaggtattactgcaccgttattaacaacttcattatcaagatcaatgacagtttcaattttcacatcttcaaaacctttcgttagtaaggtaataccatcaattaatacaagcaattgggggcttaatccagagactgaaaattttgtacagaatttccagtttcatttgtttcaggtctgttaggctggtgcaataatttcaacatttgcttgtccattcgaaattactaaaatatttcaacaaattgttatagttgttaataaagattcaaatttaaatctaaagaaaaatgaattaccaacaaaagtttttcagtgttgcacgagatattgttaaatatgaaggttggaaaggtctctatagtggttatagttatcatatgactagagatgccgttagtgcaggtctgttttatagtgtctatgaaactgttaaattagaattacaatcaatcaataaaaagagtgattattttaatgataaagtaaaggataaagttgatgcaatttgtgtaccattatctggtgcaatcgctggtgcaattgcttgggctacagtttacccattggatacgataaaggctaattatcaaaaagatgttttaaataatattatacgtgttaaggttggattacctaaattacctgttgttgcaagaaaattagttccaaatatttcaatgtataaaggatttggcccttcaattactagatcaatttgtgttacagcagtttttttctctgcttttgaatatctaatgcaaaaaattgcttaatgatgtttatattatattatattttactgtatatatttatagatctatatagatttgttttaatttcatacactgttcgtaaattctgatcttctatttcttttgtcttttagactttgattttgaggcagtttcttcaactttcctctttaataaattcttaagaaatttatcatcatcaattactttaaatctaggtactccatcttctttattaattggtgggaatttaccatcaatgacatttttcaaacattgaacttcattaatataatacaatattcgccatttccttcttatcaggatagattataagattctggtaatttatatgttccatcatgttatataggttgggtacttgatgtatccttattttgattaattctttaattgtttcaactgttgatttagttaataataacttttcttctaaaagttgatgtgattttaaaattgttctatgtataaatgaaactaattcatttgaaggttttctttcgattgatttaacaatttttttaaaccatttttcatcggattggacagattgataaattgatgttataattaagattaataataaaaattcaggtactacttcaccatcactgtaaacttcatatttttcagataatataccaatatccatatcatcagaaagattttcatctaaatattctgaagtttcaataagttcaaaaattgtatcaactaaagtagtttgattgattaggatctaaaaatttaaattgtttttcaaataaatcttggaaatattcttttattgttggagtttgaatttctgcaaattcatactttgatgatggtaattcaacataaccatattttcttaaaatttcagagtttggtaattcaccataaatattgaaaatttgttcaccctttttaatgtctttttctgcaatcatgacaagttttgtcttttcatattttaatttagcattacattttgtagtatcggagttaaatgtatctgctaatggtaccattgatttaaagtatgagtcttgtgatacaggatcctcttgttcagcttcatcatcagattcattatctgaagttccttcttcatctttatggttgtgttcttcatcttcttcttcatgttcattttcttctccttctccgtgctcttcttttccatcttcttcttcaatttcttcttcaccttcaacatctttatcatcattttcgacttcttcaggatgttcaacatcaaaggaataacttaaaataagacttgcaataatatgaaatttttctaaagttaaaaattctgctaattcgtttgattttatttgatttggtataatatcagcaactaaaattgaatacatttcctcagctgagttacgtccaattcttgataaaacaccctgaaggttttaaatattgtaattcttcatcattccaatacattaaagtattataatcatcacttttcaatggtaaaacattaagataaggtaataatttagaattttcatttaaataccattcataagctaaacaaataattaatgcttgccattgagtaagggaaagtaaaacatcatgtacattatcatttaaatttaaaatagatgcagtttcaacattgaatatagcatctcttgataattcaaataatgattcaccggctttgatatcttcaactgctattaaaccacgaccttgattgatatttcttaaatctttaatttcaaatttatctgaaacaaatgaaaagttttcattaatccattcctcaaattttcagtgtgtgattcaaaagacatgtttgtgggtatataaattaagcttaaattgatagtgaaaagtaaaaaaaatttcagtattaataaaaatgaaataaaataaaaatattttttgttaaaaccgttatcaattgaaaaatttaagaaaaaggtgagaatttctagaagcttctctcagtgaggtgaaaatgacaagttggttgattttataaatatcaatggctctgtcaagttgattttggtattgtcaattgtatacaatatcttttcattctttttctttaaatatctgtatctctaaagtaatcacacttattcatagttataatgtccgctgaagaatttaaacaacaaggtaatgatgcattccgtcaaaagaatttcaaagaagcaattgaatatttcacaaaagctattcaagcatctgaaactccaagtcatgtcttatattcaaacagatctgcatgttatacttcattacatgaatatattgatgcattgaaggatgcagaagaatgtgttaagattaatccaacttgggctaaaggttataatagagttggtgcagctgaatttggtttaggtcaatatgaagaatcaattaaaagttatcaaaaagcattagaattagaaccaactaatgcaatggcaaaggaaggtattcaaagtgctgaagatgcattagctaattctaatcctggtgaaggtatgaatgcaatgtttagtaaatttactgatcctcaattaattaataaattaaaggcaaatcctaaaacttctgcaatgatgaatgatcctgcattagttgaaaaagttaaaaaaatgcaagcaaatccacaatctgttgcacaagatatgatgtctgatccaagattaatgacaattattacaactattttagatattgatttatcacaacctccaaatgctggtgcaacttcatcaaatcaagaaaatgaagatgttaaaatggaagaagaaccaaaagttgaagaaacatcaaaacctaaggcagaatcaaaaccaacacctgcatcatctaaaccatctgaacctgtaagtactgaaaaggaacaagctgatgaatttaaggcacaagcaaatacattatataaacaaaagaagtttgatgaagcaattgaactatataataaggcatgggaaacttataaggatattacatatttaaataatagagcagcagcagaatttgaaaagaaagattatgatactgcaattcaaacatgtttaaaagcagttgatgaaggtagagaaatgagagcaaattatacattagttgcaaaatcatttgcaagaattggtaattgttacttaaagaaggatgatttaaagcaagcaattgaatattttgaaaaatcattaactgaacatagaactgcagatacccttaataaattaagaactactgaacaagaattaaagaagagagaagcagatgcatatgttgataaagaaaaggcagaagaggcaagattagaaggtagagattatttcactaagggtgattggccaaatgctgttaaatcatatgctgaaatgattaagagagatccaactgatccaagaggttattcaaatagagctgcagcattagcaaaattaatgtcattcccagatgcaattagagattgtgatatggcaattaaatatgatccaacttttgttaaagcatatattagaaaggcaaatgcacaattagcaatgaaagattataaattatgtattgatacattatatgaagcaaaggaagttgaatcaaagaatggtaataatccaacacaattaagagaaattgaaacattattacagaaagcattaagtttaagattccaaccattagaaggtgaaacatatgaacaatcagttgcaagattccaacaagatcctgaagttgttgaaattattcaagatcctgtaatgaatacaattttacaacaagcacaaggtaatccagctgcacttcaagaacatatgaagaatccagctgtctataagaagatcatggtccttatggctgcaggtattatcagaacccgttagttaattatagttaaatactttatactctttatactttgttttaaaataatataatagaaacccttaattgttaataaaatgatgaaattttgaaaattggaaaaaatttactgtgcgtattaattttactctataagtttgttactgtttactactactggtctctttcttttttgacttttttcttttaacaccactggtggctatgcaggacctcccattgactgtagtgtctgtgctgtctctggctgttggtggtgatgagtgactccagcgttaaaaccatcgtcttgcaggtcttcttaggaattgacccatgaccggatgatgacctactgactggcacattattattatttataaaaatgtattagtaattaatatcctaaatgtagtatgtaactgaagatacacatgtagtatatcagtgtattgatactgaaagtacaactaactgtctgaccttataaattaactgtgaatacagacaactttactatggggcgctgcgaaaatgaaatttgaagcagaaccgacatttattattattattattatgaaagtgttacaatgaccccacatatctttttttattcttttgacagtgtatagtatacatacaaattaatcaacaatggaacagtcacacgattcatatggtcataatcaaacacatcatagagaatccaatagaattggtaaatatcaaattgttaaaactttaggtgaaggttcattcggtaaagttaaattagcatatcatacaacaactggtcaaagagttgcattgaaaattattaataggaaaactttagctaaatctgatatgcaaggtagaattgaacgtgaaatttcttatttacgtttattaaatcatcctcatataattaaattatatgatgttattaaatcaaaggaagaaattataatggttattgaatacgctggtaaagaattattcgaatatattgttcaaaatggtcgaatgaaggatgatcaagcaagaagatttttccaacaaattattgcagcaattgattattgtcatagtcataaaattgttcatcgtgatttaaaacctgaaaatttattattagatgatcaattaaatattaaaattgcagattttggtttatcaaatattatgagtgatggtaatttccttaagacaagttgtggatctccaaattatgcagctcctgaagttatttcaggtaaattatatgcaggtcctgaagttgatgtttggtcttgtggtgttatattatatgttatgttatgtggtagattaccttttgatgatgaatcaattcctgcattatttaaaaaaattagtaatggtgtctatactttaccacatgatttatcacctggtgcaaaaaatttattaactagaatgttagtcgttaatccacttaatcgtataacagttcatgaaattatggatgatgaatggtttaaagttgatttacctgattatttaaaatgttctgcatttaatgaaactaaaactttaacaactgatgatattgatgatgatgttatatttgctcttacaagtgcaatgggttatagtagagaagaaattattgaagcaattaaaattggtaaaacctcagaaactgaagaaattttagatagttatgaacttatgactaaaaatactggtttagttaaatcaatgaaaaaggaaagacttgagaatgaggcaagacaaggaatatcacaagaacaaatacaattacaacaacaacaacaacaacagcgtgaacaacaattgatgcaacagcaattacagcaacaacaacagcaacaacatcaatctgatagtgaatggcgatctccaactggtattgaaggtcaacaacagacaatgaatatatcaccaaattcaactattgcaatcttaccatcttcattaccacaaattcataaagcttatatgattcaatcatatcctgaacttgctaatgttcaacctgtaactgctaaaaaatctaaaactagatggcattttggtattagatcaagatcatatccacttgatgttatgggagaaatttatcgtgcattaagaaatcttggtgcagaatggcaaagaccatcagaggaagaattatggacaattaaggtaaggtggagatattcacctggagataaacaagaatctgaaaaaattaatgataatatacctgatatgatgaaaatgcaaattcaattatttcaacttgaaccaaataattatcttgttgattttaaagtttgatggttgggaaagtaaaaatcaatcagtttcaggttcatcggagtctcatagtagttccgatgaagaattagtttcgtcatttcagtgcttatcctttcttacatttatctacacgtttaatcatggaacttgctgtaaacagccaaaattagtttatatatcctatcctattactcttatatagttttatcatactttgtaaaataaccaccagaataagctcatgcaggtaagcttaaattagcaaaatcgaatcaattaacaaggcgagaaatcataagacaaaaaaaaaccctttaatttatcactaagtttaagatcggtgtttgcttgttaatatactttatattattgatagtgtaaacccattgacaatcacaatcaactctatttatcacaatgagtagaggaatttcagaagactacttctcaatgacgagaactaacagggatggtgcgttgagtccttattcatcaaatatgatgtccccaaatacacctggaggcggtttacatccaacactttcatggggtgaaacaccagagtttgcaggtttaacaaagactaaatcacatactggtaatacggttttcaaaagtgttaacttaggtaaagtacaaagagatactaaagtttacccatatcatactattcatttaacaactccacctccgaattatcttttacctgtatcaccagaagatttattagctaaaattactggtagatgtgttgaatgctcaaatcgtctgaatagtaaagtgtacacatttaccatcacaatcatcagaattagattcatcatctttaaacaaacatattccattgatatctaaaaatagttttagtggtagtttatctgcaccttcaactgctaatagtataaataagaaaaagtcaattttatcaaaacgtggtaatgagaatgctcatattgaaagtcatttctctaatagtgttagttttgatacagttaatttaaaattctctgatgatttaaataattatccattatcttcattcagtgatagtggtgatgaagcagatattgataataatactgatgataatttatcaaataaagatagtcaagataatgattttgatgatagtcgtggtagatctaaaagcaaatcaaaaatattaaataatagacattcatcaaaatctccaagtagaagtttgagtccaagggctaatatgattttgccatctgatttagatatggtttctcaaaaacataatagtatgagacatttattttcattaaaatatccaacaagtccaattattacacatgatgcatgtactattactaagaaacataaattttttgatgatatgtatgcaggtagattaagatcattatcaccaaaacttaagaatagaaatataatgtgtcatgttagtggtaggaaacatacatgggttggtattgattgggcatgtaatcaatttttagaagatggtgatacaattattatcgttgcagcaattaaaaatcctggtagatcactatcaagatatcaacgtagaaatagttcagatgttgcatatgtttcaaatgttactgaaaataagataagaaattcaccagaatatgcacaaacagtttctgaaaatataatgaaatatgcactttcaataattaatcctgatagaattgttaaaattacagttgaacttgcaattggttcaacaagtgatgttttcaatgatatgtttgatctatatcaaccttcattaattataattggtactaaacctggtaaagtaccaccaactaaatcatgggcaactaagaggctaactgataggattgtggtgacatcacctgttccaacaattattatttcacctattaatatgggattatatgaaaataaattatttaaagttctagacaagagaatgaagtttatgaatagagataatcctaatacagtttatgaaaatgatgaactgttaagtgagttagataatattggtgtttatagtctagaggatcaacgtgaatatattaagaaaactgcagtgaatgacaaagttatcttgaatgaattaaattcagtaataaaagaaatgaaacatgtggaagaagagagtggatttagtagtaatattgatgatgatgataacgatgatgatgaaataaatgatgaggagagaagtgattatgaaccaagtatagattcatttgagtctaaatctttatcatcaagtaatgaatctaaacatctgaatgaagaccaatccaagaatttacaatatcctaaactaactattgagaaatccaatagtgatagatcagatgatgatattagtgttgattcatcaaatccacctccgttagttgttaacaatacaaatactgatatcactacgagcaatccgtcattcaagcttaagagactggaattacagacacagattgagatttataaagctgttgctaaattagaatctgagacattacatgaagattcattcaaacaattattaaccgttatatcagattcagcacataaatatggtgttcaacttgcagaatcagctaaattaggtggtgaagaatctcaattagtacgaacactaacaggtgctccggaacaactacaacgtactaaaagtatggttagtgataaagttgaagaagatgattttaatgaaaaattgaagagatttagacaacagaaaaaagctgaaacaacaacaggataaaataaataaaaacaatattattgctggaaatagtagcaggaagtcagttccaaagattaatattgattcaccttcagttaatagttccgttggatcctcactgaaaaaatcgaaaagtccggtaatatcgatcagttcaggcagtatttccggaaataccggtattcatggacactgagtggaagtgatagcaagagcagcagcagcagcagtaagaagaagaagaagaagttctttgggttgttttaaagctttaataatgttaactgtatttgtatactgtatagaaaatgattatgtaatatattctcaacaaaaattatttttcacgttcctgtactgatgacatgaaagtttaaagtgaagggtcaatattacatgtagatggccattgacttatagtttatatacggattgagggcgtttgttagttattaagatacaattcatagaatctgactatggatacttttgggaaatcgattatgggatacttggtcaagacaaattggtacctctagtgataaacaaaatgatgattcaaggggacagggagatttgagtagattacggatacagaagggtaaatcaaaatcatctgaatctgagagtgatttacttggtacattcattacaaaatcaattgaaatgaaaaactctatctcagagggaggatatctaggcaataatactgataatactactaataataataatgacaataaagagggagaatctaatagctcacctacaacaaatacttatgttgataaatttatggaaaaaattatatcaatggcaattccaacaactactacatcaagtaagaaagaattgaatagagttcttgaaagaattgaaattcaaaaaaatagaccttcattaagtatgcaaataatgtcaagaaattcaatattattattacagagattaactataccatttgaaacaattgatatgattacaaatataatcaattgggaatctccactgataacaataacggttttactgtttattacaatcacaattttaaaaccaattaatctgattacaattccattattttatacatgttttgaaataataataccggcatatatgatacaaaatccaaatattgatgaaagtgtgaaaagttgggaaaatgaattacccaaacctgttaatgaattttcaagggagtttttgttaaatgttaccgatttacaaaatagaatgatgttatatataaattcatgggatttcataaatgcttggtgttggaaattattttattttagggatgaattacttacttggtctatatttgttggtttattattcacaggtttgattattgaattatttggatcaaacgttattttttttatgttaccatatttgaaattactaatggttatactggtttgggtacttgtaatttcacttcatccgaaaaatagagagaaatttttgaaaagattttacagtgaagaagttagattgaagacagttactttattaaatcgttgtgagtcaaaattattaaaagatttagatttgaaaaatgatgaaatggaaatcagacaaattgaaatatttgaattgcagtattttaatgaagatacgagatcatggcaatttgcatgtttctctaaggatatgtatccattaaatagtcatatcagattaaacaatttacccattacaggtactttaatactagatggtgttcaagcacctgaaggttggaaatttgttaataaagatttaagagtgaatagtcaaggaattgctgtaccaaatagtagtggtaatcatgatgattcaactaagaaacatgaaaataataataatgatcatcatcatcaatataatagttcgaataataccaagagactaatatttgatcatgagaaaaataaattgaataaacaaaagagaaaatatgaaaagatgataaaaaagaaggagaagaaagcagctgcgatgaatgaaagttataaagatacaagtaaaaattcgagtattcaaagaagaagagagagtaatgattttaataatattttacttgatcctataactattaataaaggtatacttgaaaaacttgaaactggtattaatcatgaagggtggtatttagatatgtgtccaactgattgggtgaataataattatttatatgatgtatttgatattgatgaagaaagtaaatgggtttatgatttaatagtaatgggtaatggagctgaagcatattctgcaggattaggtgcatcgaataaactaaagaaaagtcgaggagatgttcgtcgtcgtagatgggttagatatgctgttagagaaattataagtgataaagctgatgaaattaatgaaattaatgcagggaatgttggagttgaaagtgattatagtttagagagtgaagaaactgaagaaagtgagagtgattcaagtaatttgaatgcattagatgaggaagatactacagaagatgatgaaagtgtggtaatagatgatgatgatgattataatgataatgatgaatcagatgaagaagaaggagataccactatacgaaatgaatcttttgtggatacaatgcatgtacaactgtgatattataataataatataataataaaccacagataagaacagggtccttccgaaaatgatcaatttcgggcctgaaataaaagtttcaatttttctcaacatgacgactgactcttccaatgaaatatttccaactcgacaatgttgaagtgtttctatataccttttgtaaatacctctttttataaataacgaaattaatgtctactaaaaagacagatccttctaaatcctttattgcaggtggtgttgcaggagctgtggaaggtgtaattacctatccatttgaatttgctaaaactagattacaattagttgataaaagttcaacaatgtcacgtaatccattagttttaatttatacagttgcacgtactcaaggtataagttccttatatgttggatgtccagcatttgttgttggtaatacagcaaaggcctctgttagatttttaggatttgatgcaattaaaagaattttatctgatagagatggtaaattatcaggtccaagaggtgtaattgcaggtttaggtgctggtttacttgaaagtattttagcagttacacctgctgaagcaattaaaactgctaaaattgatgataaacaatcattaaaaccaaaatatcaagatggtacaaaaggtacatttagattaattaaagatttaggatttaaaggattatatgcaggtttattaccagttgcaatgagacaaggtgcaaattctgcagttagattaggttcatatagtaaaattaaaggtattttacaagattggagtaatactccaagagataaaccattaagtagtggacttacatttttacttggtgcatttgcaggtattataacagtttatacaacaatgccaattgatacagttaaaactcgtatgcaagcattagattcaaataaacaatataatagtacaattgattgttttattaaaatttttaaaaatgaaggtttaatgacattttggaaaggtgcaactccacgtttaggacgattaattttaagtggtggtattgttttcacaatttatgaaaaaatgttaactattatgggttagttagttatagtttttataatattatgttattaattactttatccctttaaaaaaaactttataaacaaaaattgaatagtaaattagaaaaaattgttcatgaaataatacataatgataataataataatcattaatccacatcttcatcacttgtttcatgaaaacgatcctcatcatcatgactttcatccgcttcttccccctctccttcttcttcttcttcatgaattggtaccagtccaaaatctcccattggtatacttgcaacatttgcctcttcatcatttctatttgaatttggaccagtatttggaaacattatagaatattctaaacgtttaacttttataaaatcataaattgcctttataattatgaaaactcccaatgcaaataatgaatatgctaatagtggagttccatgaccaatattacctgaatttgaagattgatggaaatcagggtgactacttaaagatgattgataattatccattgtagcatctaaatcatcattcataattgaaacatcaataaatgcaggatctaaaggttcaaatctattatctgatgaatcaatttcagttttattaatatcaattggtaaagcagagaatgctaaatttataattgttacacctaaacctaactgagcaccatttttagcagcatgagaagtatgtaaaagataagttataataaaacctaaaaattgaaataaaacgcaaattattgtactccaaaggaaattaaatatattaccaacgggtataccatcaatataaatttcatcgaattctgacattactgaagtttcccaatatggaggtgaaggatcatatgaagcttcattataagaaggtaaaacatcaggtgctgacggtggcgcagttgaaggcttggcagataaattgctgaaaacaccatcattacctgcaccaacatagacaacatgaccattcattgtccttacacgtgaaggatctgttgatgtattattatttgatgataaagatgatggtggtgatgatgaattatcattagtttcagttggtaaacgattgtatctactattactatttatgtaacgcagtaatggagcatttgtgtaaatattattaacagatgttctaagcgattgtaatgagtttgatagagtgctagagacagcaccagagacgttttcgggtatcattaaagtccaatagagctagctgtgtaaagaaacagaagaagaagaagtaaattgaaatgaaacaaacaaattaacggaaataaaataaaataaaataaaataaaatacgagggattttagttatgtaagaaattaataagcatttattatggtattattattatggtatttatacaggtatatatatacaccgtgggaaatttttttaaaaaaaataagattctctattttttagttttacgtaagcaaaaattgccttttttcatgaacaaatgcgctatgtaattttagtaaagaaactcactttaattttttgaaaagtaaacaaaaaaaaagtgattttcaaatttcgagaatgagttttttcatgcgccgcatttacaaaatttttaatgcgccataaattccaaaaaaattgcggatttaaaaacgacgcgaaagataaaaaaattcggagataaaaaaaataaaaaaataaataattcggagataaagaaaaaaataaaaaaataaaaaattcggaaataaagaaaaaaataaagaataagaaaatcggaaataaagaaaaaaataaaaaataagaaattaaataattaaaaataaagaattacaatagaagataaagaattacaatagaagataaagaattacataaagaattacaatagaagataagaaattgaaatgaaagataaagaaaaatacaataaaagataagaaattgaaatgaaagataaagaaaaatacaataaaagataagaaattgaaatgaaagataaagaaaaatacaataaaagataagaaattgaaatgaaagataagagattacagtatttgtaaataatttaacaatctaaaacaaagggaaaagaaagggatagagtcaaaatttctgcttttgtaaaaaaattaggggaattgaacagatatttataacaaatcggttttttaacatccaaaaaaatttaagcgccggaagcttgtcaattttgaatccgattggctgaaaataatatttgtttgcgtcaaaacacaaaagggtttgaggttttttcaaagatcacgtgattatgagggtttaccctttcttaaaaaggaaaatttcctaaaagagtttagtaattacaatttggcctatttgactgtatgattatttcagttttaataaccttttttcgatttaaattaatctattattttttcaatttatctttactaatttacagtattctttatatcgaattttattaacagtaattacttataacttttttttttcttactatagtaacaatattatacaattttttaattgaattacaaccgcttatcataaaaagaaagtattttatctaactttaaaattgtgtttgaggtgtttaaccatagtttgattttaaagcatcataacgaattaatttctgaagctaagttacgcaaaaatattgaattgtttctgctattattatcatgtatctgtagtccttccaaactcgaatcagcccaattaaaaagggttgaaatttgattcgtttcagttgtattttctaaattgccatcatcttgtgtaacatcttcggaatctaaatacatactagggtcaacgttgtgtatatcttcaatatcaattgttgtgaattctttgtattcatctaaaatcgtttgaattactaatttgacaagtatttttggtaagcaatagcatctacctgatctcagtaactctctgtaaacttttctttttctcttaatagtagggaaaaattcatatttgagcaataatgatactgtcatacatagcatataataaaatttagaattacttatacgtttgaatacactattcagcaactttcctgtgaaaatcttgttgttagaaaagataaagtggtatgaagaatgagatggtatccataatcttaattcgatgttagtattggtggtttctaattcaacaaacaatagatgtacttacggttgctccatttctgtctttgaaaagaaaaggttagaaatagtaaagagttatagaataaattattaaaaacaacaacatgcttgaattgtaaaaataaatgttacgtaagaattaaaaacttgacagattatttaacgttgacacacactgttggacaactttattaacttgcatgttcaatagtaaggcctgcaaagtatataatttaacgactatttaaattacaaagatcattaattacacaacatattcaacacattacattattactcggcagcaaatctgaaaacgtttctgaaatctggatgtttatcagcaataatattgtcatactcttcaaaaacatgaataccaaacagttcaacactattgttcagctccatccattcaaaatcaagatcggaatctctcattctagaatataatgcaaattctaaattcccagaataagttttcatccaatcatgttcaatattcacttttttgaacttcataagtaacttataacgatcatgaagttcaactttaacaagcctttcaacttttacatattgccaattgttatccaccctgaattttgcataaccagttacacctttattactaatatgagtattacgggaatggatatgtttttgttctctgattatcaaactttctccttctgttatttcaccttgagcatacaatcttgaaagagcaccttccatgtcagcatcgggttgagcttttgctgtttttgatgtcgaataacaactcatatggtcatacttatattcagttatgtttttgcaattgtcaatggttaaaaaagtcaactgattttgtgtagttttataactatttttatgagggctcacccttctcctaattgtgcaacaacatctttctgtatgaaaacaccaattatccctaaaagacccaaactctttccacaagtcgaataaatgaaggatttgatgagaaggtacatgaaaatatttttcgaagatcggtttatattcaggaatttgaaataatctttctaatttcaaagtcaatttcaaaaaacttcttctcatctcattcctattattattatcaacaaattcaattggaacatcagtggcaatcaaagcaacagcatatgcattcatttcaatcatacatttaaccaaaaattgataaggagttaacggattcacatttttaatgtcttcagcaatcggtaagaaatataacggaaaaatatgtgtaaaagctttaacatcaatcgctttaactctactcttggtcataagtgaatctaaacaaaggggtatatccctaatctcttcaaatagatgaacttttaccaaatattcatctaggttttttttatgttgaagaattaaattatgtgatgctatatccagacgtttaaaaaccattgaaacaaaaatgctcaccactcttttagtaatgtaattctcataaatagtatgcatcaaatctggacaaacaattttgaaataatcatcaagattaagttgtgaaactaaagattttgcctttactctccaatctgttgtaacatttccagccaaagtttcttccaaacatgatttatacatttcagttgtaacttttatatctttaaagacattttcagcatcatccacatctatttcttcaatttcgtcaaaaaaagtgtatgtaacatcgttattttcattgttagtattaccatcattaccattattactaccttcttcttcaagtctgttacgacgcatttctttagtcaaaggtgtaagaaaaatttgtttttctgatttatgaattgtgcaaaaagaacatggatgatttgatctaggaggtaatgtttccaatacattattcaatgccttcatatcagcagacatcgataataaatttatttttatagtaatttcctgaccattttcaataaaactaaaacctttttctgaaagaagatttaattcttcggagagagccttgcaagtaataccagtatatccaggtgaatcactttttgttaataaaacttctggcatatgaataaaattatttttatatcttaacatttctggcaaatccataaacatgacacaaaaaactttgattcctttataagtcttcacttgaatattacaatcatcactcgaaacatggatgttaaaagtaaactcatttggattgttactgcttacttcaaaaaacctacgcattttatcagattgataaacagtaccaattgcattagtattcctagaatatttctctctctcatcttccatatgttttctgatatctttattttggtaaagcgaataaagaacaggaacgattgactgatatctaaatgattctgcatcacatcttttatgaacttcgttcccaagagtatgctcttgaaggtctttattttcaaaaaaatagagacacagtgaacagtgacaaaattcaatatccttacatgtacctactttgctccattctttcaaaactctttcattgagacgtcttatttctaaatctttagggtgaattaaaccaaaagaatgcatgaatctcaaaataatgttagctttattcatagaaatgtagtgatgagaagacatccaataaacaagaaaagcacaatcagtatgaaagattctcttgaaattatttgccatgaacgcatcaaattgttctgcattgaaatgtggtttttgatattcccaagaattctcatctactggctcctgttctataatatttggatcattttctgttggaacatcttgattaggtcccccctcatcgtcactactgtttccaaaataatcagattcattagaaccacccatattatcaggcattaaatctgaagcatcactaaaaaaaccattattattatcatcatcatcatcattatcaccttcgttaccactatcttcagaagaacttgaatttccggagttaaacccatttgaaggtaacacattattaacctgagtatcaatttgattatcaatataagcatcaaaaattggtaattcatctacggacattaaaacaggagcatcagaatgaatattactagcattagcatcgttggtaatagagaattcacctacaggaggagattcataagcatcagaaagaacattatcatcatcaatattattggaaattgaaagattatctaccgacatttcagatgaagtattttcagaggtagcaccctcaaaatcatcattagttaaaacgtaatcagattcgtatctgtcacaattgtttatttcaataaatggtgaatctattataccattgtaatcccagcctttttcattaaaaaaacggttaaaaatgtcattcaatgtatctgcaatatcttgatctctcttcgtatttaacttcatgaaattaaatgatgattctttaattttttccaaatcatcaaatttaagtcttcttcttgcagcagctttaagtgtggttaaaaacccaagattcaaaccgtatagatttaagagtcccagtaaagaacctctattggttagttttgcatttttgaattttttaaaaatgtactttgcttttcttttattaacttttctagacccatatttattctcaagagtctcaatatcatcattgatattattttgaataaaattatcaatatcggcattaaattgaacatcactagacttctcttgccctgatctctcgttatagtaataattaaaattcaaagttgtacctgctgcaaaacgctttaaccttttttcactcaaaggttcccttttgtgttcctgataagatttgataattttgtaaagaatattttgcacgtttttaatagtgaaagaagatacagatgttatgtctgtttccagtattgatggtactttttccctcaaaaaagagagaaatagaagtgtatcgtctgtgtaactcattagagttgctatgactcaactataatattttagtagttcaagaaaaacgtgaaataaacaagccagataactttgcattctttacaaatttataattaatacgccaaaatgcagtattacttttaattaacacgcgtaaaacatgtttttgcttacataatctttacaatctccaaaaaacttgacttaacgccgcaaaatttggtgttcattacgtaataacattgacaactcactcacagcactctggatattacgtaataaagcatcaagattacgtaataaaattcaaaatttggagttagatgattggttagaatctcctagtttcagggagcccaaatataccggtgagacccttcaaaacttacacattgtcgaaatacaaagggaaacatacgatttttagccccaaaatcgaacaaatttgaattataatggttacagccgcaccaaaatgcgggttttgaaaattttactatgtaaaaaagttacaaaatttcccacggtgtatatattatacaaagatcaacgccaggtgaaatgtatcttaataggtaatgcattatcagcttccttatcgatggatgcaacagatgcaagtgtatcacctctcatacgtctctttaaaattgattctaaccaacgacgagtttccctttgatttcttcttaaacgtgcttgtttaacttggaaatttgaatttttattaaatgattctaataattgattatgtggtattgtaatatcaattggtgtatcaatatattcatttgaatattctaatccaaaatcatctttatttgttgttataacatcacctggataaataccttgaattggagttctaagagttttaggcattgttgctaaatcaggtaaaacaaatccaccacgacgtccagttgaacgtggagctgaacgatgtttacgttttgattcacgttcacgttcatgaataattcttgttatattagttgcagataattcttgtaatgaaggtgtaaaatctggtaataaatatcttggcataattatattacctgcatctaaatttgatctaataaattcttttaaatcttcactaacaattgcacctccatcaaatttatatccaattaaatataatgatttaaaatatatttgacattgttctctaattgaatgtgatatagcagttgcaaattctcctgataatgaaaattcttcacataaaattttagcaaattcttctggatcattttcatcattcattatatcccaatcaaatctatcagttaaatgattattaccaacagttatatctaatgtaattgggaatcttaaatcaatatttggattatcaattttcggttgtaattgttgaatttgttcattaattgaatttaaaattttatttttaatattaataatatttttagtaattttataatcataaattaatgaatcaataaattctaataaataactttcatcttcattaatattccaaacaaatgtatcatttaatttaaaaccatctctatcaacatcaaattctaatctaattggtacatattgacaatcaattggtgcatcaattgaattatcaggtaattgtttaattttattttcatttggcattataaatgttactctaccatttgtaaatccatttccataaccattataaccttccccccacattctattagttaattcatttgcagttggtggtaatttcattgattgcatacgagaatttttaacattttgataaaattttaaatcattaacaattttgttcattatatgattattaacattttcattattattattattattattattattattattattactattattattatttattaaactattggaatataatttatcctttttaaccattgattcaaaaatttttgtatctaatggtgtattagttgacaatgctttcttttgcaaaccttttttcatcaaaggtttatgcggtatcaggttctttgggaactctgtagttggttgttgattatccattgtctgtgtgtctataagaagacttatataaaaactaccataataaacatgtaaagagaagttatttaaattattattattaacatttaataaaatatacaagattacgtaatctgcttaattaatatcaatatcgttctctgcatcctccagttcctctacataaagcacatcttcatcatcttcgtcatctatgtctccattaccagtagtatagagccttcctaattgtgcctttgtagatacaacatttaatcttgccctcatttcaacaagtttctctaaattacgtgctcttgcagtcattgaacgatgtaatgcaataattgaacttgtgtgtgctccacctccatgtaatgctaaaacccaacgaacccatgttgtaattgattcaataccacctccactacgtccacttaattctcctaatgcttgtaataatcctgatgctgcaggtccatctaatcctgaaactgtagctttgataatattttcatcattggtttcattaagaattttagataatgctgacatatcacgtcctctaattgattgtaaaacacttgtagttaatgtacctgcaattttagtattaccccttaatttattgttattgttattattgttactattatttttattattattatttttaacttcagatataacagatttagctcttgcaacaatcgtaccaaaatcatctgcatcatcatcttcgtcttcatcatcttcatcattatctttactatcatgggtaataattacattaccatcaaccaattcaccattattttcaaatgatggtaatgcagcatcatcaattgattgaaatccatttctaatatttttatcaatatttaaatctggattaatttcaaaatcttcaatacctattcttgtaataataaaactacgttttgatgttaaataaccaatacttaatgttttagaatcattaacataaacatcttcaataatattcccattacctttgatcttaattatattattacatctgatatttaatttatttgatgaacgacgttgctttttattattttgattgttgctactattgttaatatcatttataataaaattctcaacaatacctgcctctgtaatacctgaaacaactgaattatttacatttaatttcaaaacatcactatcaaatgttaaaattttaataattttccaactttcactattactattattatcaattatattaacaaatctttcattatttgaactaacaattattttattatttccaattataatattattaattaaattaattgaaattgaaatttcattagtaattaattcattgattaaatcatatttatataattttgtaccacctaaaataattgtaaattcatcaatccaattaaagcaattgattttttcatcgattaaattaattttatattcttctactttctttaattcattattaatatcatatttaataatatttaaatcagaatcaataattgtaaagaaatcacttttattattgaaattatttttacaaccataagtaataacacttttattattttcaatttctaatcttttaattaaatcaccatcatcaatatttaaaacatcaaaatatcgtttaccattataaataatagcaattttatgagaatttaaccaaattaattgattaattttaatattatcattttcaagtataacttccttgaattctggatttttaccgaaaatttgatattgaactttaattccattaattgatgtacttgcatatgctacacctattggttggttattcttaccaactaaaaatgatgatggtactaatacacttgacatggttgtttgtctaaaagaaattttacttgatctttcaatgaaaaaaaaaattcatgttgaaaaataaaataaaataaaataaaatttttttaatatgcttaccatatccatccgtaatccttacatgcaatgaacgttaatgtttattattataatcatttttactgatctttattatacaataactaacaacatataccccttctattatgtctgaagaagatctttcacttccgagagctacagtgcaaaaaatattaacagaaatattaccaaatgatgtatcatttacaaaagaagctcgtgaagcattaattgattgttgtataagttttataatgattgttgcaactgaatctaatgatattgcagagaatgatttaaagaagacaatttcaactgatcatattgttcaagcagttgaaaatttaggttataaaaactatgtttccatcttggaggaatttgttaaaaattgtcgtgataatgcaaagataaaggaaaaacgtaaagaaagtaaatttgttaaatcaggtttaacagaggaagaattattagcaaaacaacaggaattgtttaaagctagtagagatagattgaataaataaatgaataaataacttatatacttacaatgtttatattatatcccctttactaattctaaaatatcaattgtatcaattaatgatttccaatatttatcatcctctccattattgtagttttcaattgtatcacttaattctgaatataattgtttaattaattccattatagtttcaattgggttaattttatatagtccaattaatccaactaatccaatctttaaatcatataatgattcattccattcattattattgattaaattttgtaaattattaattaaattgtttatttcattattaattaattttaatgttatattggattttttataaattccaattaaaattagttcaatattaattttcttaaacaaaaagtcttcatcatctaattgattattataaataaattctaaaatttgttcaaattcataatcatcacattcattcgataaaattttttcaattattaattcaattagaaatttttgaaattcttcatcattagaattctcattaataatccatttaattaataaattcatttgttctttatcatttttatcaccaaaataataaatattatgtaaataattttcataaaattcataatattcccatccatattgttcgaaactttcaataattgttgataaattgtaaactttcctacatttattattaatttcatcacaaatttcaagtataatttctaaataatctaatgatgcattctctaaaattccttcaatcaatgactttagtttatcatttataactgaaattattgattcatcattgattgatattataattgttaaaatattatttaaaattcccaataatttattgataatttcattatcttgttcaatatcagtattatttattatttgtaaaaacatatcatttaaattacaaattaattcataactatatggacctaattcatcaatatatctttcaattaataaatcaattaaatcatttataatttctaaattttcattttcattaaattttagtaatatttgcattatttgaattggattaattaaatcttgttgctttatctgttcattgtatagaagtatcattcttatactaataattattaatgatttcgatactatgtcatttttttcattatcatcattattgtaatttaaatcaatattaaaattattaaaattaacattaattcctttaatctctgtgaaaaaattataaattatacatctaacccataatagatcattcctattattgattgaagaattaatttcaattattttatttattaattgaatttcaacatcagtatttttgattttggaccaaaacatatttaagattttcagtccacaaacaatataataaaagttattacttgaattaattaacttttcacataattcaattaatggatttattatactaatatcattagttattaaagtattcaaaaatcttttcgatgaatcatttaaatcaattgaaatttcataggtataattattataatcatttgtaacataattcataaaatcatttatattatcattaatatcatcaattaattcatcatttggtaaattaattgaaactattaaatttgagattataatatcaatataaggttgaatgagagaatataaacctaatttgattgttttttgtaaataattaaagaaataataaccaaatctacaatttttctctaatgtccataagttgaaatcattttcgttatcgaggtattttaaagtatttgacaagttttgaattttaatattttcatcaattagttgattatttgataaattgatgaaaatttttaaaatccatttatttaatcttaaatcatttaaattattattaatttgaccaatttgaccaattgtttcacatatcaattttaaattctctaaatcattaaagtagttaaacattgtgaaagattttgaatcacttaaattatttaaaattttcattataatataagttattttattaaatttgatatcgttagattgataattttgtaaaaagttggatagtaaaggtgtaaatgatgaaatttcattcaataattgattattaactgaattttccataaatctatttgattttgttaaaacataaattaataaaataattatgtaaaattttgacagagagttgtgaatttcattatcatttaaattatcattaatgattttaattaaattgtattgaaattgaatattttgaatatttattaaattttctaatattttgataatcattttaattaaaatttgatcattaccaataaaagggtttgaattttggaaagataagaaataattgattaaattttcacataatgaattgatgttagcggtgtttgatttattgatattgtttttaatataagttaaaataattagttgtaaatcactttcaatgttactattattattgactaaaattttagataatttttcaattacagagtcattattgttcagggatagagaagataaagaaacttcagcctgtctccttataatattatcctttgataaagtttgagaaagaagtagcaacaatgaatcatcatccataatgtataatgtaaaagtgcgacggctcagaaacagtaattaaattataggccccttatataattaataataatagttaacagtaaattaatataaggacactacagtcaaaataatcgaaatggggcatgcaagggagtgtaaaaatcttcacttagttagccaatatttcgcgcttagttgaagaaattgaaaaattcacttgtacgtaatccattccatcccaatgtattatgatgtttacgtaagcccatactaattagtatgggcttacgtaaacacgggaagctgttgtgttggaatggattacgtacaagtgaatttgattacttaattaaataagcacaatgattacgtaaattaactaaaatttccttttgtatattaactgccccaatcagattattttgactgtaacaaagtggcaaattttcactaagtaataataatattattatagtaagtgttgataatatttgattatgtaagtgttgattatgtaatcatttcctaacatgctttaattgcattaatgttgctcttgtattatggagattcaatatcataaataaatgactgaagaatgctcaattgatcacggaattgctattcaagtacttgatcatttaaacatcaaaaaatcaagcttgtactaaagataaagtaaaaattgatggtgaatttaattaaatgaacctactatggtttttcagtgttagtaagaacaaaatggtaaaaaaaaggtaccaaattgtttgcaataaatagtagtgattatctaagtagttaattgatgttattaagtggttgaacgttgatcatagaaagaaatcaaagatattaaggaatcaaaagaagaagaaaaagtgggaaattaagatgagccgtcaagttcccttggctaattttttgacatgaattttcaggctgcttttacattctacacatgaaatttatacttatacttaattttcaatacataaatctcttacacaataaagatttattgaatcctaagtaaagggaactccgccacttatccatttaacaggttatgactaataatgagattattaacacctgatccaatgcacactgttgttttacgaaaacattattactgtgatataatttttctcttacgtaatatacagataaataagtaatctatctaatctctatttaaaagtatagcagattggacttaacaccaaaacttgtaaactctgacaaaccatggtttagctgctaattgtgccttttcttctgcaatttctgctcttaaaacatctaaatctttaactgtacgtcctgtatcaatatcaattgttttaacatctctgaaaaatttataatctttggcatagaaaatccaaaaaacatagaaaacaactaaaattggaacacaaaggaatgtttcaaaaaaatcttctgcacttgctggtgatcctaatgggaataatgcaacccaaaattgtgctgctaaaataagacaattgagaataactccaaaatatgatccaataactccacattgtgacataaatggtaattcatctgtacttctaccctgtgcaactaatgctcttctgaaaataatatgacatgcacaaattgatccccaattgaataatgctgataatcctgataatgatagcatccaatcaaaaatttcatcttgttttggagttgcagctaaataacataataatcctaataataatgaaatgccaacaccgactaatggtctaccctctctatcaacatatccaaaccattgtggcccatagccttgatctgcaattgatgcaattgatcttgatgatgcataaacacatgaattggcaactgaacaaatagcaatcataataacaacattcataattgatggcaatcccttgatacctgcgttttgaattgaaataacaaatggtgatgctgctgcacctgaattattaagtaatctttcatcattatatggaacattgacaccaattaatgtaagtgaaataatgtaaaataatgtgattctccagaaaacttgcttggttgcagatggtaatgattttcttggattttcggtttcagctgctgctaaaccgcataattctgtaccactaaatgaaaatgctgctgtaacgaaaacactacaaacacctttaaatccattactaaaagcacctggattgtgccaatatttacctccgatatatccaccttgtgggccaccaccacaattaattacaataccaagtataatataaccgatgattgtaataactttaataattgaaaagaaaaattctgcttcaccataacctttaacaccaaataaattaattataacaataaggaaaaagaaaattgaaacccaagcagctgaattaactgtatcattccaataatcaattgtaattgcagctgcaactaattctaatggtaatgtaactaaccaaccaagtgcataattccatgtcatacaaaacccccatgaaggtgaaataaatcttgtattatattgattgaatgaacctgcaactgggaacgcaacacataattcacccaaagcttgaactgtacaatacatcataatacctgttaatgaccatgcaataataagtgacgctggaccaccatctgataatgcaccaccggcaccaacgaataaaccggtaccaatagaaccgccaattgcaatcatttgtaaatgtctattctttagatttctctttaatggagttgtctctaataatcttttactacgttcttcaattgttaaattttcatcaactttccatccttctgccggtttaaaaccatttataaaattttggaaatatccttcattaactttttcagtattatcatatggatcgtatgtaggtgttgatgaaatttcattatcatcaattgtttcaatcgatgtagttgctaaatttttctccctatcaaatcccaatgacatattttttttcacttttattctcaaaatcaagatcaagttattatctaaagttcttgttcttgcctattcaaaactctaaaataaaacaaatatcatagtaaatgtagtatataactcatcttcagttaatttgaattaaggagatgtatttattcaactaaattattgttgcggggatgcaattgcgttatcagtttagttatgatctgtagctatcaaagataatagattattctacagatcaaaatgaacatctcgcctgaaaaatttcaaaaattactgaaaagggtgaaaaaatggtgtcaaagcgcatataatattatccgacacagtgttgacatgaattctataatctctgagattaagtagttgctatgacattgtatacggctccaacaaatgttatactactactattcatactataaatatagtactgttatcagagcgttatctaattgataaaatttcttatcgccttatcattccgtatttgacaatagcaagatacttttccgcgtatcctgctactatacgtcattaagattgaccaacttcttattgttggcgagtaagggttgggtttatctatttaataacaatagtttaatagctgaataggttaatcaattaatgattaactgattaacttattgagagataagaatttctaaaattaaattgtatttataattataatacaaaaaatgagaaattgttctattctaaagaaatattctgttgatttaacaccagaacttataaagtctaaaataccatggtttagctgctaattgtgccttctcctctgcaatttcagctcttaaaacatcaagatcttgaatcaatctacctgagtcaatatcaatatctttacaattttggaaaaatctaaaatcttttgagtaaaccaaccagaaaacgtaaaacataattaatataacaacacataaataaactttgaaaaatgattctgcacttgctggtgatcctaatgggaataatgcaacccaaaattgtgctactaaaataagacaattaagaatgacaccaaatgctgatccgtagataccacattgtgatgtaaatggtaactcatctgtacttctaccttgtgcctttaatgcagctctaaatcttaaatgacaagcacaaattgatccccaggtgaaaattgatgataaaccagaaattgctaacatccaatcgaaaacttctccatgttttggagttgcagctaaataacataataatcctaataataatgaaatgccaacaccgactaatggtctaccttctctatcaacataaccaaaaactcttggagcaaaaccttgatttgcaattgatgcaattgttcttgatgatgcataaacacatgaatttgcaactgaacagatagcaatcataataactgcattcataactgatggtaatcccttgatacctgcgtttctaatagaaataacaaatggagatgcagctgcaccagagttacctaataatcttgggtcggtatatggaacattaacaccaattaaagttaatgagataatatagaataatgtgattctccagaaaacttgcttggttgcagatggtaatgattttcttggattttcagtttcagctgctgctaaaccacataactcagtaccaccaaaagagaatgcagatgtcacaaagacactacaaacacccttaaatccgtgattgaatgcaccaggattatgccaaaattgacccccaatgtaaccaccttgtggaccaccaccacaattaattacaataccaagtataatataaccaataattgcaataactttaatgatagagaaaacaaattcagcttccccataacctttaacaccaaaaatgttaataactaaaataacaaagtaaaagatagaaacccaagcagctgaattaattgaatcattccaataatcaatagtaattgccgctgcaactaattccaatggtaaagtgactaaccaagaaagagcataattccatgacatgcaaaaaccccaagctggtgagataaatcttgtgttgtattgaacaaatgaacctgcaactggaaatgcaacacataattcacctaatgcttgaacggtacaatacattgaaataccagttaaaatccaagcaataataagagaagctggaccaccatgagctaaagctgaaccagaaccaacaaataaaccagtaccaatggaaccaccaatggcaatcatttgtaaatgtctatttttaagacttcttttcaatggtacaatttcttgcattttagcagtacgttcctcaaatgttaagttttcatccatataccaaccctctgctggtttaaaaccatcagcaaaatttttgaaaaaaccttgggatttctttgcataaggttcataagtatgagttgattcattctcttcaactgaatgaattgatgcagtagctaagtttttctccggatctttatcactggacattttctttgtttaaagaaaaatataaaaatactactaacatattatgaattaaattttaaagtatgtatactttcaagaaatataaggaaaacttatcacttttaatcaattcaaataaccttttgactatattagttttatccaattttaatgatctgaattgtaatcactatccaatttatcacttatcatatgttattctttcttatcataacacgaccccttgtagtaaacaataggaatagacccttccgaaaatctatttaagctaaaaatactatcttatcttttcttatcttatcttatcttatcttacctatcttatcatcccatttttgcccattttcttcctccgtatatttccacagccactgtttgtctaaagttcagccacatgcctaccctttttgacacaatgctataattagagccacgctatttgattgtctttatcgcatctttcatagcctttatcagtatgaaatctgtcaaatattttttttgctaaggcattacaagaaattcggggataagttgttctaatcgggaaaaatgtctcgcttctttgttatctaatctactgttactataagcttaaatgatctcttcgatgtatattgatgttattgtttccacaatgttacaaaatgaataggataataagtttacgccactgtttgttcaaaaattagaaataaaagtacaaattaaataataaacaaaaggtgtggacacctgcatgttcaattaacaccaaaatttataaaatctataataccatacctgggatgctaactctgccttttcccgtgcaatttcttctcttaaatcgtctagattttctattatacgacctgaatcaagatcaatattcttacctttaatgaaaaaggtataatcttttgaataaaacaaccaaaatgtgtaaaatataatcaaaactgggatacatagaaaagattttaaaaatgattcagctgatatcttacctcctactgggaataatgcaatccataattgagagatgataattaatccattaagtataacaccaaatattgatccatagataccactctgcgatgtaaaatgtaactcatcaactcctctaccctgtgccttaagtgcacttctaaatctcaaatgacaaacatttatagatccccaagtaacaaatgatgataatccagaaactgccatcatccaatcaaaaacttttgcatgatatgatgttgcagctaaaaaacaaagtaaaccaaatgccattgttattccaattccaactagtggtctaccctctctatcaacatatccaaaccatcttggtgcaaatccttggtttgcaagtgaagaaattgttctagatgcagcgtatactccagaattagcaactgaacaaattgataacattataactgcattcataactgatggtaatcctttaatacctgcattttgaattgaaataacaaatggagatgccgctgcaccggaattacctaataaccttgaatctgtaaatggaatgttaataccaatcaaagccaatgagataatgtaaaacaatgttattctccaaaaaacttgttttgttgcggatggtaaggactttcttgggttttcagtttcagcagcagccaatccacacaattctgtgccaccaaatgaaaaagctgctgtaacaaacacactacaaacacctttaaatccatgattaaaagcgccaggattattccaatactgacctcctatgtaaccaccttgtggacctccaccacaattaataacaattcctaaaataacataccctaaaattgctataactttgataattgaaaaagcaaattctgtttcaccgtatcctttaactcctaatatgttgatcaaaagtatcataatataaaaaattgcaacccaagcagctgaattaattgagtcattccagtaattaactgttatagcggctgcaactaattctattggtaatgaaattaaccatgcgagagcataattccatgacatacaaaacccccatgcaggtgaaataaatcttgtattgtactgaacaaatgaacctggaactgggaacgcaacacataattcacccaaagattgaactgtgcaaaacatcataatacctactaatatccatgcaataataagtgatgctggaccaccttgagccaatgcaccaccagtaccaacaaacaatccagtaccaattgatcctccaatagcaatcatttgtaaatgcctattctttaattttctttttagtggtgcaaactcttgaagtttgtgggtacgttcttcaaatgttagattttcatcaatctcccagcctttagaaggtttaaacccatcaataaaataactgaaaaagtttttagtgtgtttatcttcaatataagggtgttgtgtagttgtaggagacgtatcatctgttgaatatgtatacgtagtagctatacttttttcctgatcctgaagttctaacatattggttgggggtagaagggaagacaactgtttgaataaacatgcattaagttcaagtttggtggttttataatcatttaatcgttagcagaacatgtataaaaaaggttgaacaggacagaataagaattaatacacaatcatcaatacaccacattttaatttggttttatcataatatgctaataatgggtactattatcctggatatcatgagtgatgctattaattattgatctataagttttgtgttttgtaagagtattattttgtctaaacataattattttttcttcttatcaattatctcaaaacagcaaatttgtctttttaggtggctcgtcaagaataaaaacatttatttttatgctactttagaggctttgaagataaaaaaacctacagggtcctaccattggtactaatgatacatagttgttaatctttcgtcgtataagtacaatgaagtcactaatcatttaccagaacaaggaaaagcttataaggcatcacagacaaatctgtcataataatctgtcataactaatttttttttcgcttactaaaaactcgtagtgtagcaatcatcaagtttaaagtgaaaaaaaaaaaaaaatgtaatgttaatatacagaatagaaagaagttaggctttatttagttgctcaaatataatgcatattctaaattattcatagatcatacatcgatgatctaatttagttcatggcaattcttgtcccgattggagcattgttttacgatttccaagctaagatctgtattcattgagcggaaagtagtgaattatagtaaaggacccttacttattatatgattattttatatcacaataactacaactgctgcctagagacatttactagtattattttgaaaagattacttttaatgttatgttacatactagatgtatccttcttaaaaatgatatgctataaaaatttactgtaagttaacttaaatatgcttcaaccttaatagcattaatataaagtgcgttaagtttcgtatgtacaaattattataaagaagataataactgttctttttatgaaaagaaattcacctcacttgattccttcttttaattcattttctaaactatttatcctctttatccatttgagcctttagtgcttgcattaaaaatccaacatcttccttatttaaattaatattttcctctttcataatctcagataatttaaccatttcatcacgaacttctttattacttaataattgtaattgttgcattaatgaaggtggtgaaccacttgaaacatccattttacttgcaattactaattgaacactctttaattgttgatgtattcttgtattattacgaattttttcttgaaattctgctaatctttgtaaacgttgtgcatttggatcctctgatgctaatctaacagatgcactagtgaaatttctgttggaaacaaaactcttcttaactgattgtttaataattctttgtagcattatctgtatgaaatgaatcactaataaaatttcaaactcataatcctaataataataaaccctgatgtcgtcaatagaaattgaagatggaaagttccggaatttagaaaaaattttgagtacgtcagcggatttataaatttttcaccgaatccgacactgcagactttgtcaccgcgggaacccttctttttcaggattgtgcagtttttggagagcatgtgcagaatgtttatgcagaaccactgaaatcagccattttttgcaatcgataatttaaaattgtaataaggtatcactatatgctatatattttgtataataaatgaaaaaaataaacaaataatttaataatttaataaataaatgaataaatgaataaatgaataaatgaataaatgaataaaagaaggtttgggtgattaagtacaattacttaatcacttgatcatgcttggcaaaaaccatcttgatgatcatcaacagagacaatccaatttgaccaatcttccttaacatatgctccacttggtgtaatcattgacatttctaaagcagaatcaccataccaattaactaaaacaactctaataggataataattaccttcaattaaatgaacataacctttagtttgttcttgacaatgctcaaagaataaagcactatttttactatcaattggaatattatctggttcacaacatgcaaatgcatcatttgtaccaatccagaccattgaaccatcatctgaataatccattgaaaattcataaagaccagtttcttgtgcataaatataaccagttaattgtgcaacataacctttccatgaatctaatttttcaccataaattgtatcagtaacacctaagaatgcatgaacagagaaatttggtgctgtaatactctttgcagtaccaagtgttacttcagttgtatattcatttgcataataagttgattctaagaatccaaaacccccatcatatttataaagggtagcatggaaacctggatattttttcattaagttatcatttaatgaacaacctgttgcttgaggaattgttttaccagtattagtgacagtaacagcttttgcgttagtggttggtaattgttcaacaggagcagatgattgatcaataacaacagcaacaggagtttgaacaccatcaacattactaaaagcagtcatagtcgaagtagtagcaaatgtattaactaaggtggtagtaatagttgattgtggttcgttaacatataagttttcaattaaataagtttgaccactaacaacagattgttgataattagtggaacctgaactatatttagcatcatattgaacattggttgaagtcttaacaatttgatcaccataatgttgagagatacaaacttctaattgatctttatcaaaattgataatagtatcttcaaaattgttgataatatcaccacttggagtaataatttcaaaatcaaatttagaaccaaaataaatattaatataagttgttctcattggatataaagtaccttcttcaagataaacataagaagaatgagaacctgcacctctaagagcaattaaaacatcatcataagagtttggaactaattgttgggagcaaccatcaaacgcaccattacctaaccaaataaaagcaccatcattaacatcaccaattctgacattataaagaccagtttccggtgcaacaaaataaccttgtaattcaagcataacattatacatattaatattatacattgaataaatgtgttgaccatggaaattattatcaaaatcaaaagctggttcagtaacaccattagttgaagttcttggaatttgaagagcataatcatttgcaacccaattatcatcaaagaatctaattaaatcagcttgtggataatcaaagaatcttgcattaaaacctttagaatatgatggaacaccagcaacaatacctgcaccattagcagttgttgaataaatatctttatttgcatcagcttgacctaacaaggcaattgcaacactagcgagtgtaagtatgtttgaaaacatttagttgggaatgtgtttagcaattgattgttgaccaattaaaataatttaaattccggaataaaatcataataatatgggaagtctttttcatttaaatagttaggttaatagacaaacatcaaatgaccctttgtttacaaataaaataaaaagtaaacaacacgattagctttatgtttcaatataatagcatataataattttattcaaacctaatattcaatgtaacatgactatctataaaatatggatctaaagctatttctcctcaaagtttaaattattggaaaacaaatagtaacaaacaaactagttactaaaaaccctggttcctgaataaccgtcaacaaacatcctatggctttatacattacaagacgctttattagtataaaattttataaatttgaaattaaaacacggttaccttcaaactttaaaattgagaaagatatttaataaagattcaagaaagtttaagaaaaaattaagaagaattcggtataaagtaattaaatacctactacattgggaaacgcgttccgttcaaatctgagagtttatcttgatcttaatcgtctattaaatagatattcagatccaggaaattttgtgcaagtcatttattcagtattttagtaaatataccatatatagcaattattctaatgagaacatctgcaaacatggaaaatctcttgtaactatagaggaaatatgcaaagaagtggtaaaataccaaaaaactctgggcaataatagcaaaacggcaaaatggtctgacagaacgggcagtagaaaaaaatgtgagattcggttagttagtaaaaatactgtcattttaactatatttccggcaaagtttttaattatactttaattacgtctctctaacaatgaaatattaataaaatattaaaaatgaatgtgccgtaatgttatttaagaaaactaatgaaataaaagaaaagtttaataatacgagatattactttattggggtcatcgatttgacattatatacgttactctattaaaattaaagttttaacctaaactttaaatcctgcaatccaaactaaattgaaaactctagatttaaagagttagtatgcacataaagaggggttttatgagccctaatttagtagattactttgtatagtatattagtttatgatctaaacataaatagatagtaacaaattcttacaactttgactgttgtgaaacagtaaatatactatataataatgttttttgaaactgttagtttcaaagctcctgaaaataatttgcagttagaaaagtttttacaaaacggtaaaaaatattgacttaaaaaaaggtataagataaagatgtatcatttatataaaattaactttacttgaacatagtatatcatcaacaactaatttcatggttaatcaggcacaaaaattgtaccttgtacctaccttttgaaagcagttttttggttaaacttcaattaaacttgtagttttcttccaagtacccatttgtgccttaggaaagtttattgatttaaaaaatattgcatttagttgaacattttgttaaaattatcatctgatattatctgatattatctagtatattatctaataaattatgtgatagtgattttaaaatacctatcattatacgctatgtattaatgtctaaatcatggggtagaaagccactcttacaggcgtaaatttgtcattaactaatgaaacattgaagaattgtcatatattaattaacggaatttagggtaactttttaggctattaaaatgaaaagacaccccctaaacgaatattaccgaaatctgtaatttgaggcatataaaaattttgatgcctattttgatgccctagataatagatagtataaggtcgtaattatcatcaataataccaatatattgatagaaaatataagttcttataagttcttatctttttaataatgacctcaataaattttacttaataatatcacaactggaaatattatacagtataaaaatttaatcttaattaataccccttagagtaattaattctttttattatcttagtaccgaaataaagaattaaatattctaacaaagatatatataagatgtattgtaaaatcttatatatggtaaatttagtagttttgatggaattaatgctgtcaaagcaaatcaataagatataattagtaattgccttagggcagatttcccatagtaatttaacgagtaatgatgacatattcccgataattacatcaattctattaatgtatattgagttaactcaagatatagtatgccattggaagctcttttgcatagacaatacaaactctttcaatatgctcccatattaaataatgcctatcactcttcgggaggatcgcaaaaaatagtgaccgctccttccagattccgaccttttgaatgggcttcaaatggcaattctttaagtggaaatagtgttgtttcgttccagggggagggttgagtagattgagagtactattattgtaaacggtatttcatagtgtggtataatgataattatagactatgtagcggtaataaataataatagaaatggtggtaataatggacccggaggcattaggatttagaaaaaaaatagactttaatatgtccgtgcatatgaaaatagtgttagtagatcttactcttattttattttttaagttgtaaagtctttttgatgattttctagctttaactagttcttacgaaaacttgactctaactatattgccatgtagctttattgttggctctgagaatgtatatttgcgtaaagtaaaacattctcgcaaattataaacaatacattcccacattatatctttaccttgattatttattacgacacagtaacttatataccccataacatccctctcttattctttactcatctttctttctttattatttcctattcctttttaaatacttcactcaaaaattatccaattctttatagcttttttccattctatttttcattagctatcaatttttccgttctagtttttattagctatcaatttttacaatttatatctaatatctatacaatacaaaacttcaagttagattagattagatcatattagattagatacgataagattatatcatctatctttttcatcttttatacctctttcttttacattctttaaaaaaattaatactcataataatgccaggtatagtttactcatcaaatttatctcatttaattaatccaatgaacattaactacaatgatgcaagaaatatcaataataacttaaataataatacttataatattaacaatactaacaatgttaataatagcaatggtattaatgactcaagtccaaatacttcacaattagagtataaaattcaatcaaataaaaatattgtaccaatgacatcatcaaactcttattcaaatactttcaattctccaaaatcagatattctcagttcaaatgataatcaaatactcaatcattatcaccataaccataactatccagctaattataatacaaatactaattcaatgcctataccagtaccaatgccaataaatcaaaattttataccaaactatagtccaaatccaaattcaaatcaaattcaaagtcaaagtcaaagtcaaaatcaaaatttcaaaaatatttcaaatttcaatcaggtttcaaatctcccatatattcaaaacataaatcaaaatcccaaacttagttcatctataccatcaataaatcaaatacaaagttacccaaattacccaaataataataatatcaatagcaatgtattatacaattcaatgaataatttatctcctcctgtaactgctaatatgaatcaatcatcacaatctcaattacaatctgaatcacagcaaatacaacattcttatttaccatacgctatgcagccaaacattaatcattttaatagattcaatagttattcaatgccatgtaatataatgccaccttcaattatgtatcaacctcaacaataccaaatttatccatcacatcaatctattatgtcattcccatcatatgaaagcaatataagcaattcaacaaacaatacgaatatttcaatgaattcgaataattctacttcaacatcaatacctactttccccactggtggtaacactggcgataataatagagtagttgaatcaaatgatttatctaaattaaaaccaataccaggaattatggcttatagtcatccattaattccaattatcccatcagcatcgggtaacatacgtaagaatagctctaaatcattaattaaggaaatggaaagggaagaattaatgagaagaattaattttgagactacagaaattagtaccataagtacaaatactaataataacaatgaaagtgaagataaaggtgaaagaaagaataatgaagaagaagatgagaaaccatgtcgtatggctttcggatcaccaacctggactaaaaaggatgatcaattattaagatatttaaaggagaccgaaaaaattggatggagagatatttcaatgtatttcccaatgagaacaattaatgcatgccaatttcagatggagaagattagttacaaaggatgaaaatagaaggaaacgtgaacaacgtaatttagaaattaaagaaagacttaagatgaatgatcttagtcaagttatagaacaacaaaaacagaaaaaaaacaaagagattagtgatagcaaaaagaagggtaatgacgataaaaaagctgataaaatcgttgctaacaataccagttcaaacaaagaggaatcatataaagaggtagaagttgagagagaaaaggaaatggaaactaaaagaagaaaagtaacggtgaaagcacaatcacctgtacaatcatcaacgtcatcaccattagctccatcatcttcaactacaccagttaaggatgctttacagatcaaaaaggcttgtggtgttgacaagatgcttgattagattcgattcgattcgattcgatccgatcagatctgattatcgatgagatcaaacaatctcctcaccatcatttacttatatcccctataaacatttatagacactatatactatttattattatgtaccatagactagacaacataaaggtaatatactattcagagaaagagagtaaaagaaagaaggaaggaagaaagaagcaaaaaagaaagaaagagaaaaagaatccatgccgatcaacatgtatgatctcgttatgtggttatagcctcacatagtgatgtcaaaatatacccgctaaagtcaccttcttcttaaattacaggtctatataagcatattattttctcttgtaatggtattacagtgatcttataaggttacattgatctatgttataaatcaaaagctactaatcaattgattatacataatgtttaactaccctacagaatcatttgaaccattttgggggccaccaactgcaacaattgattggtgtgaagagaattatttatttaccccctatattgcagaagttattaatgcatttacaaatgttttttttgttttattagctttacatcacatttattcaacttttaagaataatcatggtgttttatatattttcatatcaattggatttgcaagtgttggaattggtagttttatgtttcattcaacacttcattatgaacatcaattaatggatgaattaccaatggtttgggtaactgcaattccttttggttatatttggggttgggataaaccacaaccttggaattttatttggaattgtggtactttattattaacttcagttttcacttacacttatattttcatttatagaaatcctgcatttcatcaaattttttatgcagccttgaattttggagttatctataaatcaattaaaacaatgaatagagttatacctgataaagaaatacgtcatagacaattcaaactattaggattttcattctccttatttgcctttggattcttaatttggaatcttgataatgtttactgttcaaatttaatatcttggagaagaaattacctcggatggccttttggaataatacttgaaggtcatggttggtggcatatatttacaggtttaggaatttattatttcattatttacaacatgattaattcagtttatatgagaggtgaaggtaataaatacactataaaaagatttggattcttagttgaagttcaaaaaattaaagataaaaagttaaattaaaatcttataaattttacttttcataatacttagtgtattgaatattattctctaatattttccatgttggattcccattcttttgcatttgttcattagcatcgttaaatactgaaatcattgtatcaaatgattttttaaaccattcttcagttctatatttacttacataaaatccaaatattttactcaattcaactaaatatatcatttgtaatggcattctaccctcaattgaacctttcagtaatctttcagattcctctaatgtattttgtaaaaccgtcttcacttcatcatcttcggaatctttatgtgtgtataaatattgaaagtaaacttgattcagtataattttgaattcatgtgggaaactctcatattcattacttagtttgatatcagttaagaagccattgattaattccttattccttgtatcttcaattgatcctaatattttacccaagaatgtcatttggaggattaccaaattgacattgatttgtaatgtggttgtagtgataagtttagataatgcattcaaataattttctaaagtggttctttgaatagattttatacaagttaatggaatcttgtttaataatgcaatactttgtaattcccatggatgtttcaaagttaaatttgggtaaactgtatgaaaataatattctatcaaattgttaattgaaacactctccacaaatctcttcatatcattctcatttctaatttgatttgataatagaagtaataatgcaggtaaatgttcttgatgttttattctagttgtttttggatcaaatattatatcaattaattctttgtaaaattcttctgaatctatattcatttcaaatactacattcaataatacttgttcatcattcatacttttcaattgacaaaataattccttgaatatcgtcaatttttcagtattatccaaactttcacatgttaaagaagtagaatattgtaataatacgctgtcaaccatttcacaaacttcatcatcaccagttgatctgatttcttttaggattttcttcatttctaaaaattttctaatttcaacttgactaataattgaatgtatatcttgtaaaatttccacaattaaactatcatcaacagtttcagaatcaatcttcaaaagagcttcaaatattactaaacaatgatctttttcaaacatctctttgtttgttgttaacatattattaatcaaaatcaattgaacttgcatgaaaaactttttatcatcgtcagtttcaacacctatcgcaacaggtaaaatatctttaatcaattcataaacaaatttagcattttcaacaacatcagcaacataattgactaatattttcattaataatgaacagaatttgtaatctctttcatcaagcttatttttcaattgtgaaataacatcttcaatcttttcctttgggaaattcaatctaacttcttcatttctaagtgaaacagataaaccatccaactccttagtggtatattcaggcatgtagaatcaaattgggaacaaaatgtacaaagtgtaagaaaattaataaaatttcatgtcacattgaatttcaaaaatgcacacacgttaaagcgtttaatgtcatttaattgaaattgatttatacatttaaagttacaaactaatacacaaaattataaattaatttctaaaacgtacttcacgataccaaccttcacctatatcttcacctctagtaccaatttctctatcaatatggccatcaatattagcatcatttaaccaataatgatttgatagaccagctgcatccatacgatattttggatcaagtactaacataccttttaaaaaatctgcaatttgataagattcttcttcactaaatttatatttatctaataaaacactttctaatggccaaggttttaaattttgaatttttcttaaagttttaaaatctgaatggaaataatgtaatccataattactatatttaattaaatgtggcggtaaataacctaataattcaataatttgagctaaatgatcatcatttttaccaaatgttttaccctctgttggttcaaataaaaaatcacctgttaataattcaaatatcagacatccaactgaccaaatatcagctgaacaaccccattcgccacgtaaaataacttcaggtgatctatattgtctagtttgaatatcatgtgtaaaatgtttataaatccaacatgcattacctaaatctgctattttaacatttataatatcatcatccattaattcatctgcacttggtggtacataatcaaataaatttttctcattttcttcatgttgtgaaacaattgtttgaatatctttatatgacattctacttggtaaatccattgatgaaacaaatgaacttgaatatgagggaatactattggcactattaactttataatgtgggattgggattgtgataccatccttatttgaagtatcattatttgttgaattggtattcaaatttgtttcagtattttgttccatttgattatttgaagataatggtgagttaaagaatgagcttgatcttgatctcaaaggtgatggtaatggttgtgaatcgcaaataacagaattagcacgggttttaccatatcttgtcttaccaaatgtaacatgttgtcttgccttagttagattagttaatgatttagtatcaatactaccactaccatttactaggtatttacttgaaattttctttaatatatgacgttcccattgagtttcttcaagataatttaatagttgttcaacttgatgtataccaattaatatattttcaggtttaatatcagtatgaataataccacattttcgatgtaagaaatcgattgcaagtaaaatttccttagatatttgtttaacaaatttaatcggtaaacctttatgtttataccttctaattaatcctaataaactttcacctagtacttcaaaaacaatacaaatatgagtcccattctcaccttgatgatcaaaataatctaaaagcttgattagatattgatgaccaggatgatctttatcagttatattgattttactcaataattttatttcatcaattgcggtttctctatattctttagcactacgtacaactttcattgcaacatgaacattatttacagtatcctttgctaaccaaacagttgaaaaatgaccccatcctagctttcgtacaagaatatatctaccatctttataggtttcaccaatatatgcaggatgataacctccaagtttataatcttctggatcttcctctattgcttttttatccgaaccattttcattatcattatcatcttcatcatcatcgtcatcattttcaatcattgataaatcaataacatgcacatcattattatttgatatatttgaatctaatgatgatgcagatgatattggattctcttcaacaatatcatcaacatgtaattgaaatctagcactatgctcctctttttgtaaatgttgtagttgtgaaatttcttcagttacatcattagaatgtagattatctattaatttttgttgtaatagacttgatccaattccattacttggatgtttcccatcaatatgtacagctgtctcagatacgacaggaactgacgtaagtacagataatttctttcttttcaaagcatctccactttcattactacctacattatcatcattattatcattattatttatcaatgggaataaaggattcaattttctatcaactgcttcagttatttgattatcttgtataactgaagctattaaagtaggtgcattggttgcaattgaaggttgattttgaaatgcaactgataattgtgatgtttgtttaacaggttgtggtctaattggttttgattgttttgaatcaaaattaattggtgattgagaagaatcacgtttcccacctgcaccattagttgtactttctgtcattaactttgtcgttgttttctatttgtcgatctgatctataattgcaaacaattgatgacttagatgacagattgtaaataatcgatgctaagaaaaatgattaagtggcggtaatgatgtaatactgcggctaggaaatttcaataatatacttaatgttaacagccatttcttttaagttatatttatatacttagttacacaaaagttagttaaatgattgcttttctagtcattaatggatgaggatctaactgagtccatgtatttgacaatttctgggtaaggaggaaagatcaacgcccgctccaacaacatcatcaaatgttttaacagtgaaaatatcactgataagaatttcatcacttgataagtattttgtagttttaattttcaattcattttcaataaatttcaaaaatcttgaaattcctagcaattatgttcctccatagtcaaacctccaggaaaataaattaatggatataatgcaccaacgaaaatcagaattcataaatgatagccattttaaattatttgctttttcttcctctgtaacacctaaaaattccttcttgtttgatttatcaacaatataggtaaaaattgcaatagtttcagttaatttataacctgaaggagtaattaaagccggtgctttgtttaatgggaaaatttccttataattagcagtttcttgctttaacttagtttcaatctttaatccaacataatcacctaaatcagataaccaattagatcttgaagatgttggataacagtatactgtagcgaatgtcattgtttggtttattaatatacagagatacctttataaattaatgaaattaccccagtacttatatagtcgaagaaagtctatatattgcatcttgatgtttgattactaattaataatcaccaaaaatagttttgatgaaaacggaaacaatagcatatgattattaatgattatgttatattactttattatattactttatttaccaaaaaacgttatgttaaatattaaatattatatatatagcagattagacggaaatgtatgtagataattgttgtgataaataaaatatactccaataaaattatcaaatttatttcatttcagaatcaccatcagcatccttctttctatttgctgcaatctttgcaaaaatatcagcagctgcagcagcttccttctttgcacccttttgttgttttaattcagcttgtttagaattatatctacccttaattaaattaccaagagctgctaattcttcatatttagcaacatatttacccttagtagaatcataaccatcatcatataaccattcttcagtatccattaacattttagaaagtttttccttttcttcttcatttgcaaaatctttatattcatcttctaatttacctcttaaagtataaatatattcttctaatgcattcttcttttcttcagtttctgcaactaatttatcagctgcaaccatcttaaattctttttcaaacagatcatttaaaacttttgctggtaaagtttgaccgaaatattcaacatttaagtccttagttttaactaatttcttaacaatcttatattctggttccttaacttcagcttcttcgccttcttcagtttcttcaccttctttcttttcttcttctggttgttcaactaattctttgaattcttgttcagaaacaatatatgcttcttcaatggtgtataaaccggaaggatcttgtctaaccttaattttacaagttgcagcatcatcattttctggaatttcaacaccagtaattgaccatttaccaataacttcattagtttctgctggtaattcttcaacattcgagtatttagcaacaatttcaaaatcatttgatctatataatgtaatgattttagtagatggataatttgaacccttggtgaaaacttctaaatggtcagtttcttcagtacctttttcccaactgtaagtaacggaatgtaagttaatatcttcaaatttgaatggtttaactcttaaagttggagaatgcattgcacaaatgaaagctgcacctttagcaattgattcatcttgattaagagttgttgaaaattgtttaccgaaaatttcagtaattgtattttttaaacatggaattctagtagtaccaccaattaattcaattgaatcaatatcagaagttgataaaccagccattttaagagcttcagtaacaggatttgcaactctttctaataaaggtttaactaagttttctaattcttctctagtaagttgagatgagacatcaacatcattcataacagattcaatattaattggagcagcagtattagcagataaaactttctttaatttttcagcagcagttaaaactcttgaataagcctttggattagttctaatatcaatcttaaatttttctttaaattcatcagcaaaatattcagtaattgctctatcgaaatctctaccaccgaaatgtttatcataaccagtacctaaaactttcatttcaccctttttaattgcagcaactgtacaagtataagatgaatgaccaatatcaatgaatgcaattttttttggttcatcttctggtaaatcagttttgaaaacaccataaccaacagcagcagctgtaacttcattaacaattctaacagggtttaagcctgcaattttacaagaatcagctgcagctcttctttgagattcagtataccaaacaggtacagctaaacaaacatctttaatatttgatttagtttccttttcagttgttaattttaatttattaagatacattgcagctaattgaattgaagtaaatgaatgtttttcaccttgatatctaacatttgcaactgtattattttgttcatcagatgataattcaacagttgaatatttttgttcaactgataattcaggtgatttaccatttaaacctaacaatctctttaaacctgtaacagtattttttaaatttgaagtttgttgagttgcaccagtttcaccaattgctcttgccttcataccgaaaccgacaattgttggagttgctctatttgagacttcattaacgacaacgtcaatacctctatttcttgcaactgcaataactgagttattattacctaaatcaataccaaatggagtagacattatatattagtagattcttagttaaatgaaagaagtatttagaaagatataaaactaaatgaaaaaagaaagattcctatataaatttataaatattcgtccattctacccatttccttaaaatgaaaattttcacacatgcacggttaatataggaaattttgacatcaaatttgcccttctaataagactctccttggttaggattcagcgactgagagactgtgagaaccttcgagaagaattacttagtataactgcgccactgcacataggttacgccaaccatcacatgtattcaagtactgcgccacctgcattacgtcatcattactattagaataatactttccttaactgcgccacttcctcacttgacataaactcaccctcatgttgctgtaaccacaattgtacatggaagtctctcaattctgctaccacaattggcgtctcttcaatattcatatcttgcgtgaatttaatactatgtggaatgtaatttttaatattatcaatactaacattctctccatgtaattctctatgttcaatagggaatgtagattcatatgtagaaatattctctgacaatgatgattcttcagggaatccatgtgttaatgatactaataaatattcaactgggaatgttggtgatgccttatgttttacaatgactccatattcattcttatcctcatagaatatatctggaatatatctcttacgtgttttagatttatcatcattttcattattaatataaacttgtcccggatgtgtactaccaacaattatatcccccttaactaacgcctcagcagattcacttgcttgatatgctgctatatcaatctctccattggtattaccactaataatacatgtaacaaatctactactaaattcttcattcttttcactactccatttacaatgatgtttgaatctattttgccatttagctgctaatataacttcacttgatgacatgaaaaaggatttattatgtcttttacaaataactttaccatcatttgtacctgcatctgataaatcagtataaatcatacctaatatttccatccccatatccaataatatcttattaacattttcgaattctttaccattttcaccatctttactaaaatcttcaattgatataccatcatcaaaatctttttgtggtaattcataaatatccgaaacaatcgccttaacacctaatggtactttatcatatctatcatatttaccaagtaataatccaactctttgtctaccggtatttctccatgctccaataaatttatcaacaattgtaggatttaaaatttcaacatgatcaactaatctatatttttgtctattaagtgaaattgctgatggttgacattgtgaacaaatacctcttggccatggtaaatgtcctgatggacatttttctaaaactgtgaatctactaggtgttaaaactggtatttgattgttctcatttaatctactacgtaattcagataaatatgcatgaaatgataaatgtttaattccatgatctgcttgatattcttcactccatggtggtaatggtgaacaatattcacacatacctctaggtccatgacgacaaaatgaacccatttgtctcttaattaatcctttatcattatctaattcatcatccatcttagattgtcttgatttatttgatttctcttcaattggtttatttttaattgcaactgatgcagaattactaccttctccttcaataaaatcaattgctagcatttcaccattctttaatcccagttgtgcaacagtaacaccctgaacatcattaacacttataatattaccattattcaattttacacgtaataattcaactggtatttttaaattattttgtgaaatttcattgaaaattttaacaaattcatcattatcattacatgtaattctgaattgacctgtcttacttctaaatcttaaaatcgtcattactcaatgtatgaatctatagttaaagaaaaataaattagacttaaatttgcctttgtaaggagaatgcatgaatcttgaatttttcgtaatcattgaaaatttgaaatttttattacataatattaatcagagttattcaattaatttagataattccccagtctcttctattgcatcccaagataaccacccacccaaagcataatgacaataaagttatatgggtttagtaaatatgcattctatgattctttaatgaagataaaagatttaaatatggtaaggagtgatgcatattatatttcacgtcaacgtagtagattatcaacacctgcaccaaattctttagaaactaatgcaaaatcaatggttttcgatccaaaatctaagggtaaaacagttaaatatagtgatgtttttggaggatcaactaaaactgctacaaaatcttcaagaagagatgtttcatatcgaaataagacaagaaaaatagcaggtgtaattgtaccttcaagacctattgaacctgataattgttgtatgagtggatgtattaattgtgtttgggaattatttaatgaagatttagaagattggagacataaacgtatagttgcagcacaaaaattaatgaaacaagatattaaaaatggaaataataaaattgaatattggccaagtgattgggaggtacccccttcaattttagataaaaaatttattttacatgataaaaaagatttaaagcactcaaataaaattgatgaagttaaaggtatgcctgttggattacaagcatttgcagcttttgaaaagagaaagaaagaagcaaaggaaaaggcaagtaaattaaaggaatctgaatccgataaatcattatcaaaatcaaaatctacaattagatcagttaatactgaaaatatacaatctagaagtgaaactatttctcttaaccaataaattccccttaaattttgtttatattatttatttatttcgttcatatagtttgtttttttaaagaatacacataggttataactagataagattataattataattataattaattaacatcaacaccttgagattttaagaaagttttagcttcggaaatttgttcctttaattcaatatatttatcttccttatcttgtaatgtataaactccataacctaaactaaataatgcataactaccaaaactaattaatgcccaccatggaataactggtaaaatttcattatggaaaatttcagatgttggaatgacaccaaaatataatgcagcgtatattgatgtaattgcaaaaaagaaaactgcagtttcgtatgctttagtcatggtttgtctattaaacaataatgattaagatgatgataattagcattaaaatctattgacacgtacaaatttgcgagatttcatggtaataggttttcaaattttaactttgcctggggagtgaccttttttcatcggttcacgcgatgtctttactgggaagccctcactggagataatgtactaaagtgttaaagtcctatagttgatataaataaatattaatttaaataacaaaacgagtaagaataagaaagtaagtaaaggaatgaaggtattaaagtaaaaatatacgtgtgaaaaagggagttgaaattataataatgcagcaacaaaaccaatgaaacctgcaaatacacctgcctctaattgacctgcaccatttgtgtgtgaggttgaactaattgatgaaactgtactaacagtacttgaagaactagtttgaattgtagttgaactaattggtctatgagatgaactgattctagaactactctttgaggaagttgatttaccattaattaaattcttttgatcaatagtaagatataatgaagtagttgaagatgaatcacctgttgcaacaacaaaattagctctagttaatttatcattagttgatgttgcatctgaaatgtaaagattcaaataatcatcaacatcaacaaatttaccaacatgttcaattgagacaccattatcaatcatccattgagtatctttatttgcttcaggcaatgaaaatgatgcattaaatgatttatcaagtgattgaattgagttagtattacattgtggtctttcataatctggaatatcagattcattgattttcggaattttagcctttgataattgatctttataattaaaataatcttgtaataaattaacatcattttcatcaatttcaactaaaccatatctagcagcttccattgaatattcataaattaaaccaccatccattatatcagttaatcttgagtcataaacaccttcactaacttcatcaaaagttcttggagattttgtattacaaccatattcagagaaaaaaaatggaactgaactattctgaaattcattttccatcttagaataaccagatgattgccaatctgagatacctgaacaccattcataagaatttaaaccgaaaaattgaatacttgaatcaagtttttcatcatcattttgacaagttaaatattcaaaagttggttttcttaatgataaatcatcagcagctgaatacccaacgaaaatatctctagcggatgtattattatcatcctttaatctattttcaatataaactcttgcatctcttgtaattgcacgtaaatatcttggatcaataccagctgatttatcatcgttgataacttcattaccaaggaagaaaccaatgacatttgaataagttctgaaactttcaataactttgaaaacacgactcatataccatgcattataggtaccttcaggatcctctctatttaaactttcaccacctaatggagaatttacatctaagatgacataaatacctgcactattgaaaatagacatacattgatcatgatttaaatctggatcaatagtatagatacgaattgtattaatacctaaattttgtaaagcagttgcatctctagcacaaacatcaggatttgttaaaacatcagatgtcatattatatgtataatctgatgaaccaccaggttgataatcgacaccattaatgaaaaatgcttcacctaaatcagaatctaaggaaggttgaacaaatttattacttttaatagttaaaggtaaaagagcatttgcttgttgaatagatgatccaatacagagtaaagttgtagcaatggcttttagtaaaagcatattgtgtgtaagtaagtgtaagtgtatttactgaatagaaaagcaaaagaaagctttaagaaaacaaacaaaaaaaaaaagaaaaagaaatcaccttgtttacaaatcgttctctcagatggaccccacagatttgaaataagaaatgtaaacaaactgaaatttttttattttcgtggtgctacttatccttgaactttattgaccgggaccattttatccattggtactttcttttagacaatgcttaacgtatccgctatcatccacttggctcgtactgttgtaggatccggaattattctggtatccattgtatctgccctctcacttgctgcattgtatgttttccaaagaaaattagtatacccatcaatgctaaataaagcaagggaaaaagtggatactcctgatatgtttgatattccatttgaaaatattaaaataaagacaaaagatggtgaagttttacaatcttttcttatgttacatgattcaaattcatctgattatacaaataaaactattctcatattatcaccaaatgctggtaatattggtatgttcctcccagtgactaattatatttataataacttaaattataatgttttcatatattcatatcgtggatatggtcattcaacaggtaatcctcatgaagcgggtttgaaattagatgctgatgcagtaatggatttcattgcatctcataaacaattatctcaaagttcaataattacctatggtagatcattaggtggtgcagttgcaatttatataacttctaaatatggtgatcaaatatcaggtatgatattagaaaatactttccttaatatacctaaagttataccacatatttttccacttttaaaaccttttagttggttatgttcagaattttggaatagtgaagaagatattaaattaattaattcggatataccttgtttattcttagcaggtacaaatgatgaaatagttccacatgatcatatgaaacaattatttgaaattgtcggtacaaagaataaatcagataaacaatcaactaaaatttggagagattttaatgctaatcataataatacaattgttgcaccaggttattgggaaatttgggcagattttacaaaagaaatggttataccaattggtaaataatattcccaactataatactatatacatacacaaaactatccatagaataaatcaactataaaacaaatccaccctctccatgtgattaattcaacaatttttctaatccatttattttgaaaatgaacatataaactaccacaactattattaccctcttgatcgaaaacaccttctccatattgaatgtatctacgaatattacaaccattccaaaaattccaccatttagctctctgacatgcactaatacgtactaaatttttagttaatggtcctgttggtccatcaatatatttccattcaaatggtgaccaatgctgtcttggatcagatggatcaagttttggatcaccccatgctccatcatataataaccaattaccatatttagtttctctaaatggatgtgatccattaccataatttaatttcatttcattgctttcttcatcaggtgtaaatgtatatgcaagataatttaatgcaggattccaaagtcctccacgatctgtaaaatcacttaatatagcatatggtaaatcatgactatgttgacctgtacttggataatttgcatgtgttcctctagcggaaaatatcgcaggttgtttaccattaccaatacaaatacccgtttcctctaatgattccttttccatatgatcgtaaaaatatgcccctccacctccatgtgctgacatccaaacaacaactggttcacctttataaaatcttactaaactatgttcccaatcaccaacgtgatcaccaaatggtccaaatcccattacaaatggacctaaattaaatgaataaaaataaaaccaatatgcatcaacccatccattacccttatctgtaacaattaatgtagctggtgcattttttatttctccattatagaaatttggtttattatatttacctgttaaccaatcaggatctgtgtcaaaatcttctaatgatgataaaaacactaattcttccttagtagatttcggtaatttctctaaatctgataaatgtaatttttgatttttataatatggatcgttttcatccttacctggtatattaattgttgaaccatttctccaagtaggtcggaaatgaccaacatatttttcaatatcatatggtaaatatcgttcttcactgtatagaaaaaccaatggtgcataatcagtaacatattgaggtatttcacctggcttaagtgtcatggattcctttgatgggaatgcctccaatggtggtagatttttataaaaaggttttgccttcatcattgcatctattttagtttctgcctcattgttgattaataaatcaattggtgatccattacatagtaacatatagtatattgtaaatacccaataatttattgacatcctgggtatcattgttcaaagctgtttaaagatgctcaagagaagaagctatcaactgatcgtatacagaaactttacaaaacgtttcaaagggcttcttgcagacacttttcaaaaccccgaagtatccgatattttttattttaatatggataccgatttgggaaggtttagcgatgggaatttttcaaattgttgatttagttgaataaacagatctacaggtttcctttgaaatatcaatgccatttacgtgtaaatgacagtgcaggaacgtacacaatgtatatcattgactaagaagggattacaatgcaaactatacgctctaccaaatgaaaaggtgtgtcacgtacatataaaatatcaaaatgatacgcgtaataaaaacaacagttcagttaagacggccacaagtaaacagaaaaatagcaactataactacaataacaacttggggaaagttaagaattacaaatatgagaattataaaaagaatttaagtgaaattgatgagaaacctggtcacatctatgtattcacatatgcccatatgatgtactcaacgccaacagagaaatcatatttacatttggcagcaccaacaaatactagaggaattgattataataggacgacgccatttgatacgtcagataagatacttatcaaagtagggtatacaagaaaaagcccagaaattagagtaaatgagtggagagaacaatgtggccattcagaatttatccttttatatccggggtgtttagttccaacttatcaaaatcttgaaaataagaaaaagcagaaaattacccttttgagtaaaatgatgtcaaaattaagtttgagtaacaatagaaaaagaaatgatgataaagaaatattattgaatagacagcacacaggcagaaaatatacggggttaaactccacaaaaacgtgtttcgttagcaataatccgtatcaagtggagcaaaatatacatcgaatactgagaggtagatatggttatggtaaaatgttttgtgaaggttgctcacgtcaaaaaattgactcaaataaaaatacagtgaagacgttgggtattcacactgaatggttcctcattccaagaaatgagatgggtattgtttgggaagtaattaatgaacaatgcaattcatcatcgaacacacgtttcttcaaaacataaagttgtaccaagaatttatttggccgttagcttttctgctcgttttctgctcccgaagaatgcatgaattgcatacccgttgctgtttttctgctccgatcctcttatcttttcttttgatgattacttttgttactgataagtattttcatcgtaaaaactgtggctaattggaattttcattggctaatagttgaatcagatcattaccattgaaaaattagaaatgtctataaatttgtagttcatttccactaaattttgtaaattatcattctacgtagaattatcttgaaaaatcaaacaaaacaaaactcaaaaacttaacaaaacttaaatgaaactttcaactatcattacattactctcaggatcaactgctcttgcagcacctctcgctaaagctccttatagtaatgatacaacctatatgccattacaatatttaaatggtgctttaccattaccaaaaactgatggctttaacttaggtgaaatttctgaagaattatttaacaacgttaatatctctgcttctttaatttcattaattgattgtgcaaagattggtgcaattaatgaaggtaaagaaattttccatgttataactggtgatatcaaaggtttttttatgaaagatcatacaaatcaacaattatgggcagtttatgatggtaatccaacaactgaattagtatctgagttagttgaatatgttccaaagattgttcaagatggtaaaaataaggttaatttcagttgtatcgattgtatgattgatgaagctcaaatgttagcttcagatcttgtcttaaaggatttaccattattcctcagagaagttgctcttaatccttcatactcaatttatgttgctggtaaagcttatggtgcagtttctgcagctttaactagtaatgagttgtctcttgcagataatgttgtaagtttaatcacatttggtgcagcaaaatttgctaatgttgcattctctgaatatatggatgaacattatggtaaaacaactacagaagatcttacaactcatagtaacaatacttatttaagagttactactgatggtgattctactccattatttccaatttttgaaactgattatgcacattctggtaataatgtcaaccttatcaaacaaggtaatgatattattggtggcatgcttagaggccaatggaaaccagctcaagatgcattaactattgaatcattatctgatgatgttaagaatgctttaaagaccgcttttactattccaaaagcattcattcctggtattgctgagtttactggtaacttattatgtcctgttaacacttatgcttcatagtggtttttttaactaagtaaaactattgatttcgattgttattatactttttatttttattgtttatcttcttatcttctttattatataaaatataaaacttttttaaaatattgggttttttagagtttttggctctgatataatttttaaaaaattgggagcatccttgatgttcacttttcagaagtatgattttttaaaaattttaattttttggtcaaatttgattgaaaagaaactaatcaaactgttcagtgagtacttgacctttctttccctaactcaacattataatactgtgctattatacagcagagtatctaaatttgagagacacaaataacacaaagttgagccacctaaaaatcacgacagaaaagtatgtcgtttataaaatctactgcaatcaactcgcttaaagtttccctcctgagacaacttgtcaaatttcagggaagttgagataactgagaagttgactacatcaaagcattagaattgattcattagaatattatatagaattactaacatccaagaatcttctaagtttcaacaaggaaagaatgtctatcaacgaaggttatacccttacagttttaggtgctggtgttatgggatctgctgttttatcagcaattttagcatccaaaccaagtccatttccaggtaaaatttattgttgtacaggatctgaatcatcagcacaacgtttacaaacaacatatggcgaatcagtaattgctacttttggaaaagataatgttaaaccagttgaagaagcagatgtcatcattttaggctgtaaaccttacatgtgtcaagctattattgatagtgttaaaagtgcattaaatagtaataagatagttatttcattattagcaggttggactattgaacaattacaaaatgttagtggaacttcatatattgcaagagttatgaccaatacaccagctaaatatggttgtggtacagcaatcgtttcattctcaaatgatttacaagattctaaatttgattcaactagagattctataatgaaaattgttgatactgttggaatggcaatggaattacctgaaaaaaatatggatgctgcaacttcattagttggatcaggtcctgcatttgttttattaatgatgcaagcattagctgaaggtggtgttcgtatgggtattccatatgaaactgctaaaaagtgtgcagcaaaagttatggaaggtactgcaaaaatggtattagagagtggtcaacatcctgaagctttaaagagtatggtttgtacccctggtggaactacaattggtggtcttatggttttagaggataaaggtattagaggatcaatttcaagagctgttgaagaagctgcaaatattgcatcaagtcttggtaagaaatagatttattatattttattttatatttacatatcataatttataaaacatttaatcaaagtataattagcaaagggtatatcaaattgaatcagcctaaactagttcttgaattcactcataatcttttgatattctgcttctttcaatttttcttcatatttgtcagcttcttcctcttctaattcacctctttcaaatttttgtctatattcactttctttaaccatggcagctttctctctagcatatttttcctcttttaatgtggagaatgtcaatataccaaaccaaacttcaataaaactataactgaaaacaacactgttacaaaggacaacccaatcacctaaataacagtaagcacataaaccgaaaaagaataataatcttgcaaacactgcagattcaaaataagctgtattaccttcaattaatggtgcagcatcactcaaaataagagagatcataagaacaccaatagttgcatagattggagatttttcattcaccattaataatggtaagttcattgaagaggatagaaccagaacacctgaatattcaagaacagttttcggagaaacaatcagataatatgcaatgtaagagaataataagattcttcctgataatagaacgtttgatgagaataatgccatattggttgtttgattagaagttattcaactttaagatcaatggttaacatgtttaaaatctgaaaataaaaagctttaaattttcatgggatcaaatttctaagcgacacggagttaagcaactgatgaagtttcagttgctttgtttctttactagtaataggagtataatagtagtaggtaatgatagtagtgacatgagctacagtaagtttgatacctccacattagtgggtatagagtgtattcttgttgttatgacttaaaagttaacttcactcccgatgttatttatacgtgtattattcttgtaatacagtaatacgaagtatgactactatttcaatctctctgttacgttacaaattatataataagtacgatgcaaccaactataaactctctataatccttccaaaaaccagagtaatagataagaaaaagttgtttcatcctactaaggtgacagcgaaatcaattatcatgaattttatcataaattttgtataggataagcttccatttcacaccgtttctttaatctaattatcccgagggtccattttaattctacaagtcaatagttaatttggtaaataaataatgtcgatgggaaatatatctaaaataggtaaactaggacaagtacctgaacttcatcctacaaatgaggagtttaaacatcctattaaatacctctcaaaacctgaaaatattagacttggagaaaatttcggaattttaaaagttgtaccaccaaaaggttgggaacctagattttcacttgattgggatagttttaagtttcatacaagaattcaaaaattacatgaactaaatttaagaaatagatcaagagcttgctttgttgaaggttttaattgctttttaacatcaaagggcatagatccatttcccgttgatgatgatttatgtttaggtgtatcaaatgattataaattatctaaagtatgatttagactctcatcttaatggttggttcagaacaaatgatggatggtaaggtccatatccatgatatatttcataagtaaagaaaccagaaaatggttttataaaataatggatgatgatagagaatcttttgaaaaaattaagtctttacttgtaaatatttatcagcaaacacttagattgaatgataatcatggtgacgaaaaggagaagaagaaatttaatgattctgtattaccacctgaagtatctcacaaaactttacataaattattaatatccccagctgctttattaagtacaaccacaaaactttaaaaagttagaaagaatgaaaacaagaataagtaatactaggatgaaaaatgctgaaagttctaataaacgtagaaagttacactgatacccttaatacccaattattaactccacctactgaaaaaccttcaacttttgaaaattctcaattctctacaccgataaacaatatcctatcatctgatccaataacaccaccagatataatatcaccagaatcattggatgaaacatgtgtgatttgctttagtacacattcacctgaacgtacgttaatatgtgatggatgttcaagaggtttccatatggattgtttgtcatataggttagataaagtgccaaagtttgattggttttgtaatgaatgtctcgttggttctacgagtatttatgctgattatggatttgaagaagaatttgcaaataaattttcattaaatgaattttcaaaatactgtaaagattgggagaatgagttttataattatttaagaaatcataatttgattgataaattgcagttagaagtgatagaagatggaaaaggtaatcataaattcagtgaagtttcagtagagaaacttttctggcatttgactaatggtactatacggataccgaaatcatcaaaactaaaaattagatatggtgccgacataaatagtaaagttccaggagaactatcaggattcccaaataaggatagtataagtaataataatgaagatgataaatatattgatgatgaatggaatttaactaaattaccatttgcaaagggtagtttgcttgaatatgtttgtaaaagtttaaatgatgaaactggatcagaggtagaattatctgaagtcaaacctgaaggaatatctggtatgtcaattccttggatatatgttggtggtccattatctacattttgttggcataaggaagatcattatacattatcagccaattattcacatttaggagcaccaaagaaatggtatggaattgcaaataaagattgtgagaaattcgataaaataatcaataatattgcaccagaatatgaagctaaacaacgtgatttaatgcatcaattggttagcatgatttcaccaaatgaattaaatgaattagatgatactgataaaattccaatctatgaaacaattcaaagaccaggtgaatttattataacattcccaaaagtttatcattcaggatttaattatggatttaatgttaacgaagcagttaatttcacattaccattatggataccttatagtacaactgctattaaagattatgaaaaagttggtaaggaatgtgtgtttgatacgtttaaattattgaagaaaatatacattgatttacaggatgaacagtgccaaagggaatggatggaagataccgggattacttttaatcaaattggagaattagttgaatgggttaaaaatcagtataatgaagagattgtaaaattccaagaaatttataaggatgaggaatttagtgaactattgaatatagttgaaaaagtaaagattgttgattatctgaaagaaaggaaaataattaaaaaagaggataacaaaattaaggaggaagaagatgaagaagaagatgaagaacttgaggatcgtgtttgttgtgattgcaaaaccagagttcattttcaatggatggttgtggatatttataaagattgcatgaaaggaaggaaaattgtggtgaaagaagttaataaacaggaggaacaaaaggaacttgaaaactgaatttgaattagaaattaaaactgataataattacagagataaggaaagtgaatgggaagcaataattagggaagctagagaaagcggcaaaacagaaacggatgaaggacacacaagaaagagaagatcatctcgtcgtaaaagagaggaaacaattgaaataaacgaagataaagacgacaatggaaatgatgatcgtgccaaggaacaagtctactctgcacttgaactactgcataatgaaaataatgcttttggacaatgtgtattctgcatgggatgtttctccaaagagcttacaaaatttgaatgcaagtgaaaaggaaagagtcatcagtgtcagtagactagtaggagagtagtttgtgtgtatggatataaataacaattttttataaacaatataatcactacttgtaatataccatatagctatatttcccaaagtagacataaaaagctaccgtaataggcaagtgcgctttgagcccccactgaaaacatgctgtaaaagttggccaataaaaaagcatccttgtttgcccgtacgcgagagtgacagagttcagctgctggggaattttatgggcagtaataaataaaattggtgggcgcgaatgatgggtagccatggggagtttttttcagtggtgttggcaaaattcaatttttcaaaggcgttctttcacttttcaatggaacttgtcgctttcaatttactttactgcttattttgtcctatgaatttagtttcctcttgctccttttcattttgatttcattctttctacatcgctacattctatagctctcacttaaacaagatggttgctagattatttgccacttcatcaagaactgccttaaaggctgctaaggctaacttagcattaaacagaggtttagctactgcagcaccagctgtcggtaaagtcaagtaagtatcaatttttcttttattatgatttactcattataatttctacaatccacaatgtttgctaattgattacacgataattaaacagattagttggaactagtttgaattggaaatatcattgtttagtcggtttttattgtggttatatttttttaaataaaacttgattcatctcaattaaattatgatattttacattcaatctacattctacatcaatctttagtatattactatttaacatctattcatcatgattcgccaataacgggtttagctttctttcatattgaaatccaaatttttccattttcgtcgaattttccaccacaaggaaaaatttcgcgcaattggtcaattcaatataatgattatcaaccaatcaattattagcattcctctctcatataaatgaactaaaatactaacattattatcattactttttatctattataggtccgttattggtgccgttgtcgatgtccaattcgaacaaggtcaattaccaccaattttaaatgctttagttatggaaaacgatggtaacaaattagttttagaagttgctcaacatttaggtgaaaacactgttagaactattgccatggatggtactgaaggtttagtcagaggtcaaccagttaacgatactggtgctccaatttctgtcccagtcggtagaggtactttaggtagaattttaaacgtcactggtgatccagtcgatgaaagaggtcctgttgaatgtaaggaaagaagaccaattcatcaagatcctcctgctttcgttgaacaatccactgaagctgaagttttagaaaccggtattaaagttgtcgatttattagctccatatgctagaggtggtaagattggtttattcggtggtgctggtgtcggtaaaaccgttttcattcaagaattaattaacaatgttgctaaggctcatggtggtttctcagttttcactggtgtcggtgaaagaaccagagaaggtaacgatttatacagagaaatgaaagaaactggtgttattaacttagaaggtgaatcaaaggtcgccttagttttcggtcaaatgaatgaacctccaggagctagagcaagagttgctttaactggtttaaccattgctgaatatttcagagatgaagaaggtcaagatgttttattattcatcgataacattttcagattcacccaagctggttccgaagtttctgcgttattaggtagaattccttccgctgtcggttatcaaccaactttagcaactgatatgggtttattacaagaaagaattactactaccaagaagggttctgtcacctctgtccaagctgtctatgtcccagctgatgatttaaccgatcctgccccagctactactttcgcccacttagatgcaaccactgtcttatctagaggtatttctgaattaggtatttacccagctgtcgatccattagattctaaatcaagattattagatgttgctgttgttggtcaagaacattatactgttgcaactcaagttcaagaaactttacaagcatataaatctttacaagatattattgctattttaggtatggatgaattatctgaacaagataaattaactgtcgaaagagcaagaaagatccaaagattcctttcccaacctttctcagttgcagaagttttcactggtattccaggtaagcttgttagattagaagaaactattacttcattcagagatgtccttgatggtaaatacgatcacttaccagaaaatgctttctatatggttggtggtatcgaagatgttatcgctaaagcagaaaaaattgcttctgaagctaactaagcatcaaatctgtgattgattgttgttaaacttcttaaacaaagtttttagaatagaaaaaaaaaccaaattcttttttgaatagaagaataaaaacattcacgttactatgattttttatttatttatgattatttattcctatccctagtgatttatttatatctctaagtgtctctttttatatttttaatttaaaaaaagatttatttattgtttgtattccttattttatttccagtagaaattggtgacagtgaattttgaaagctccacgtaatgctttataacaagatcgcgtaataaaatattcaacatgcaaatcttgtgttcaccacattaatttgacttcttttttgcccttcttcttcgttccattgaccagcaatgatttctttcatggaaagtgcaagaactttgatggactgtccaggtttcaactggaagtctttgattattggtttcacggtttcaaattttctttttgatacctatgttaaataccgtcaaattaaatgtgtagaaaaaaatggtgataaaattccaaaagaattaacaaattacaagatcgattctgaaacaatcattaaatcaagtaaatacagtttatcaaaattgaagttttcaatttttacaggtgcttatgatttatttgaaaatttattattattaaaatacgatgttttaccattagtttggaataaatcagcttcaattttaaatagtcttgcaactttgattccttcaatctcttctattgtgcaaaatagtgtcatctctcaaagtttggtttttatgggtttattcatgtcaatttcaattgttttaagtattcctgttaagtattataataatttcgttcttgaagaatcatacggtttcaataagttaactattaaattatggatttctgatactattaaacaatttttattaacatgtgttttaggtggtccaattttagctgcatttttgaaaatcatgtacatgtttggtgattcatttatgtattacttatccgttttcttatttgctgttcaaattttcttcattattgtttatccaaaattcattcaaccattattcaacaaattagaacctttagaagacggtgaattaaagactgctattgaaaagttagctaaggctaatgaatttccattagataaattatatgtcattgatggttctaaacgttctggtcattcaaatgcttatttcatgggtttaccatggggcttctaagcaaattgttttatatgatactttgatccaccattcaactaaagaagaagttgttgctgttttaggtcatgaaatcggccattggaaattaaatcatacaactaagttgatggtaatcggtgaactccatatgtttatgattttcactattttctcagtttttattagaaatagatccttctacaattcatttggttttggtttacctaatggtatcaaggaaatgccagttatgataggtttcttattatttggtgatgttttaaaaccactggatgctgctatggaatttttcatgaatttagttacacgtacttacgaataccaagcagataaatttgctgcagagcaaggtctttctgatgatttaaaaacttctttagttaatttacataaagaaaatctttcaagtttagtcgttgatggtctctattctgctaaagaatataatcacccaacattaggtgaaagaattgcagctattgataaatacttagcagaaagtaagaaggagaaataattttgtttatcaagtagttcaatgacatatacatgtattataaaggtttataaacttttttttattcataaaatcagccaataatttcagtaattgtaaaatatgatcgaagggtcaaaacggattatgtgtcaccgccgccgttaaaatttccgaaaaagtacctaatcgggtaatcgcgcttaattttgattatttttgaagtttatttcaatctacgaatcaatgatttgttcaatctttttaagcggggttttcatcctgttgacatatattttctttctaaatcatcattttgtggttatacgatagcaattttgatctattttattaaagtttttaggtttgaaattagcaaaatgttattgcggaatataccgagatatattcaagtgaaaaaaaccactaactttgacacatttaaaagaatacttagcacgatatctgatgaagaactttcattattccaaccaaattttgtgaaaatttccaatttacgaaaacatcgtaagttatcaatggaaaaacatgaacttattcttacaattttaaactccaccgcaactaaaagagaggctcgaaattatcttacaaaatatagaatacttgatgataatgatatctacaaaaataaacacaaactcataaatttggatgacaagtgaatcacaaatggtgacgaatgaaggttattcatcatacattgataatattttgagtgataatgcatctaataacaatcatgaaataggtctcgaacattcgccgaacaacataagtagtgataatgcatcaaatgacattaaatctacacaaactatcagagtatgtgcattaagaataaaaaacttagatcaatggtctgatgatcaaatgcaaaacttagcagtcgttttacgtaaggccatgagtttaggtgccagtccactaataatcattgatggcgatttgttaaatagttgtaattctacgattgaaaaagagaaagagctgtatatcgaatcaaagcttgagcaactacttgaaaattttggtgaagtattaccttctagaattgtccaaggatgttttgatatggatgcagaaggtaagttgactacagttatacctgaaatgattggagttccactgatgtcaggaataatacctattatatcaccaatagttgttaaatcaaaatcacttgaaagaacatgcattcaaggttttgaattgacgaatgcaattgtcaaatgtttagaagaaaaagattttaaaggtttgttatcagttgaaaaagttgtttttattggacacacaggtgggtttccaagtattgaaagatcaaaaggtagtcatgttttagttaatttattacaagagtatgatgatatcaaggaagaaattacaactgaattgaaattaaccgatgaacagagatatattcatttatcaaatttaaatgagatgaatcaattacttgagagatctcctaacattactggtatgttaacaactgttgagatgtcaacaagagaagaagagaaacaagtaggaaaagaaacaaaccctattatatttaacatacttacagaccgtcccactatatcttcatcattaccagtttcgttacgtaggacaccacagttaaataccactatcgttaaaaaaggtatgtccatcacaacattttttgataaagatcctaaaaaaggtttagatttaattgaaatggataaacttggtaaaatagacttaaagaagcttaaatttttgatggatgattcctttggtcgagatctgaatatgaatcattaccttaatagaataaataaaagagttgcaggtttgattatatccggtgattatgaagggggtgcaattatcacttgggaagactcaaaacatggttctgttgcattatccttgataaatttgctgtcatcaaaaagaaacaagggtataccaggaatagctgatattgtattcaaagcgaatgttaaataacttcaagaatgaattgttatggagatcaagaaaaacaatcctgtgaataaatggtattttgagagatcaaaggctaatgtttcaattccaggtactcaatggagattatttgttactggtgaacaagaattaacattagaaaagttaaacgagtattcgaaaatttgtggatcaattgaaccatcatttgatattgatgaatcagttaagtcttagattcacagttatagagaataaaacgaaatcaatcgtttgaaaattatatttttatagaaaagtttcaaaaagtttagtaacgaaaaattaaatactatataaacattataaggatgtataaaatcaatcatcaagtgcatataatgtgataatttttgtgaagaatagatataattttgtaatgtacatggaaaattgttttaaaaacacatacctattagatggatttagacatataaacaccatccagttcgtaacccaatcttctataataatttctgacaccaacaccagaaataacactaatttttgaagagccgtgttcttctcttgcaattctttcagcttcttccataagtaaagtaccaaaaccttgatgttggaattttcttggatctctagagtgtaatggaacaacagaaccataaacatgtaattctctaacaatactcgtttgttgacctttgaattcttttctatatgtgtatttctttgaagcttttcttagtcgaagtaaaccaataagaatatcttgtttaggatcttcataagaaaggaaggtttcccaacctccgttagcataataatctcttcttatcagttcaacttgatcaggttgaattttatgatgcacttcttggataccaacttctctagttctcacatcacgacatgatgtaccaaaatctttcattctagctaactgccaattctcttaaattaccattttcaacaccagaggtgaccaaaggcattgggatatctctttgaactctataaattcttgtccaaggtggaactaatgccataattctcgcaactaaatcaattaacatatttgcgttatatgatttgtacaaaccgtttttccaaagttcgtataaaccagtacctctaataactaaagttggataaattttcaaaccatcagttctaaatgcaggattttcaaagtattctttaaattgttctaaatctctttccataccaacatttggtaaatcaggcatcatatgagagacgactttataacctgcatctttagcataagcaaatgtttcacaaactgctttgacagtatgtcctctattggtatctcttgcaacatcttcataaacagattgaacacctaattctaatctagtacaaccataacgtaacatatcatctaaatgagtttctgtacagtaatctggtcttgtttcaatagttataccaacacatttagtttgtgattgttgagaaaatgcaaccgcttcatccaaatcagtaccattataaccaggttaaagcattgtgtaattgaacaataaattcttctctataatctttcggtaatgacataaaagtaccacccataataatgtattcaactttatcaatactatgacctaattgtctcaattgttcaattcctacctctagcttgttcatatggatcatatcttgctctaatagctctcattgatgttggttcataaccggtataagattgagttgaatattcaaaatcagaatccggaccaccaggacaataaacacagatgttaccagtatatgcaatatgtggacatctatgtggtttagacataactgcaacaactgcaacacctgaagcagtacggactggttttgcctttaattttggtaataaatactttttatattgatctggaattgagctgataacatcagtcaaacgtggttgttgtttaagtttatatttcttagcatatttgataattataccatttaaattcacttcttttgatgttcctaaagatgaaactaattctaaggaaatatcaccacaacattgaacaaatctttctttttcagaaggtaatttttgatgtgttttaggaccttttgccattcttgattactatcagacgaatatggtgaacgttggttccttttcactaacaaaagctaacttttagtaatttgaaattataaaaatttgatagggattcatgattaaaaaatattccaaagtaaaaaaaaaatattttatccgtgcaccttttatttggtacctaaaattcactttttgatctcatgaagtgttcatgctatttcagatccataacacaaaagggcattaatctaggaggatctttgaatttttattctcttctggagttatacaccaactaaaagacttatcgggcttcatatttcttaataaatattaaatatggctggtaaatcgaagagaccgaggtctaaaaacaaaaagaagaattctaaaaataacaattcaaatcaaccaaatcaacacgtcattcctgactaccaatgataatgatgcagttgaagttaatgctgactcaattgatgaaaatactacctgaattgaatgattctgaagctaaacaattaattgccgaagaaatcaatgctgaaattgatgcaaatgttaatccttttgatgattccaatgcaatcactaatgaagagtttgaacaacaaatcattcaaaccgataatgaaatttctgaacaaacagatgtaactagagtcgaagaagagttagctgatactaatgaagaagaattaatcaatgaatatgttcaaaatgctggttccaacaacgagttaattccaaaagatgaaataattgaaaatgcaattttagaatcacgttttacagatccagctgatgatgaaatcaatacccaagagattgaacgggcaatagctgacgatgctttaaatgcggagaatatccaagaaattgttgacactgaattaccaactgaagatacagagaagagaacattattattagaatccaacgctgatttagataaagaaattacagcacaaccttttgaacatagtgtacatgaaacaaatcctgaagtatttgatcaagatattgcattatatgagaaaccagaagcaattgatattttagaaacccctaatgaagaagaacatctgaataaagagttaaattctgatatcaaaactattgattcaacaaactcacctcaagaagaaagattgcaaacagaacctgtggtggcagaagatgcagactttgatggtgttttttttaatgataattcaaaagatgagatcatgccatggaataataataccactaatgatgttgtaaagactgaagaacaaactctttttttcaatgataattctaaagatgaaatcatgccgtggaataaaactgctgctcaagatgttttggaaactgaagaaccaaccaccttctcacaacttgaagataaagaaaattctaataacgatgaagattcattttttgcacaattatcttctcaaaatacagatcaggtctttcaaaatccagtaaatgaagcagaacttccagaaactaaagatgaaattttgatttcagaagatttaaatgcagaattgaatgatgatgatgatttcttgaaggaattagcagatgataccaatgttgaaaattcaaaaaatactgataccgaacccgctgaagataattttgatttccttgctgaggatgatgatattttgttagacgatattatggatgatgacttacttgatgatgatgatgaccaacagcctagtaatgatgcaaataaaattcttgttgagaattcacaaatggataatacagctttgaacaatgaacaaccagcacaagtttcaaagtatcaaccagcaaaacataattatactcctcaaaacaattatgcgcctccattactaaatcaaacatctgtttctaactttaagagcacagtttctgatcaaactccacctgttcagaactcatttattcctcaagctctacaacctaagattttaacgaacactcaaccagattttggcagttctaaccaaaaattagtaaaagaattaaagcaagagaaaaagaaatcagatgcttatgactttccacaagatctgtttccgaagaaggaacataccatatctagaaaagttagtaccaatttgtacaaggagattgcaaactctagtaaatacccccctgtacaacgaccagcttcaccatttcaacaaaatcattcatttgttccacctccaccagtcggaaggtgcatcaaagattccatattcacctataccatcagctattaattccaatatcaacgtcagttctaaatcatcaaggtcaaattcaactgtcagtggtaaagtaggttcattttttgcagaacttcctgttgtccaacctaaagtacctttgacctgtcacaccaaaagtcaatagatacgaatcaatagagaaagcatcatctttaataaaccctccctgtttcaagtacaccaccgatacctcatttagcaacacaacatcatgcaccaacagcttttgcatattccatgaattcattaagtactgattcaacaaattcatttaaccaaaattcaaaatttaataagtgaaccacctgtactcaaaaaatcaaccaacccatatgctcctgcaactgtaggtggacatgttagaagtatttcaaaaattactgttgaccctgatgagatcaaagctaatttagttccagttcctcaaaagccaagtattgtcattccgccatcttcaggaaatttcagcaatggtgatggatttacttcaccatttcaaccaaatcgccctactttttcacaaggaacccaagaaaagataaataaccaaccactaaataagtattctccaaatgtatctcatttcccgacttcaaatattcaaccaatggttaacaaacatcaaaatctatctgttccacctcacgctaatttgaaaagcaaaagtgcagccagaaataggcaatctatttcatctttgaatgatgtgtatggttctaacattgttacaagtaatgctacctcaatgaacactcgaaaagcttctgcagcaccacctatatctggtaaacatccaataccagttaatacttttacacctgcacctgttgttatcaatccagaaaatttggttagaagacaatggccattatttagtttttcagctgaaaacaaagttgcttctttgatcccaacatatgattcatacaataacgttattgcaaatatcaatattgttgatattaaagatgttattaaaaaggattcagatctcattacatatcccggaccattggttaaaaataaaactaaagctaaagttgttagtaagtggattgaagataaattaaacctttccaatgaaaatcaaaaactatcagatgttgaagagcttatttggaaatgtttgaaggaaatggttgatagaattacaaaaccaggagacttctttaatactgaatatgtgaaaagcattgcaactattttgaatccatcattaagtcttcatgatgctggaagtaatgcatttgacatcctcgaattaactagaattactcaaaattttaatgctgataaaccattcaattcttttgctttaaatgacaccgggttgaaaactatccatgatatgttagaagttggaaacaaaaagtctgctttagaatttgctcttgctcagggtgactggactatggctctattaatttcaaatttgatgggttcaatagccttcaatcaagtcataaaactatactcattaaagatgcttccacaaaactcattgggtcatgacttaagctttttcatccaatcaactacaaacggatcatttactttggacaattttgttggaaaggaaagttggattgtggaaaactacaagattgttattccattcataatgatggataatttagaatatgggagaactttgaattttattagtaaccttttacttaaggctggttatagtttacatgcaaaacttttacaaattttatctggcacatcaatttcctcatcagagtataaattcaatcccaacttcaattaatgatctaattataaatgaaatttatgactttgttttattatcatctggtaatcatccacctaactttgctagtggtttcccacatatgattacatcaagagttgcacacgctggttatcttgcagatgttggtttagttactgaagctaagaaatatattgatgcagcacaaactttaatcacatcaaaaactattttctgtgatccaattacattatctttatatgagaatttatgcgatagattatctcaagttcattcaggttggttaagttcgagattaagtcgaccacaattagataaagtctggacaacattagataaatcatttaataaatttgttgctggtgaagaattacctcaagctgaaaagaaaactgagggtgtattttctaaattcacttctccagctcctatttcgagaacttcatcttctttagatctcaatgatgttaagcaacatatcaataattcaaattttggtacatctgttaatcaatcgtataataataaccgtattccaccaaattatgctatgccactaagtgagccaaattatatgaaaaatggtaataaatatcattcattgaatcataaatcatcattgaatgaactttcatcaaatcaatatgcaccagttccacctgttgctggtagatatgaatctaatgctacaaacacgacaatggaattgggtgcaacttttggtaaatcagcatcaaccttgaatattgctaatgaaaatggtctttataaccaggttccacctgttagagttccaccgactcaaaatttaccaagaggacaccaaaccaacaagtatgctccaacaaatgctgcagttcaaaaacctgaaactcatacttcttttccagctgtttctaacgtcccaccgattaccccatcctttaccaataaatattcaccaattccaatttcagcaccagttcctgtttcaaacacgaattttaatgatatgatgaatgaagaattaattagggattattcatctactgaaaaagatattttaccacctgtttcatctttatcatctgccaaacctaaatcacctgttgtttcattaccaccttcagtatctttaccagtttctgcaaatccaccaccatcgactacttcatctgcaccaccaccaccaccagtatcaagcttacctccctcaactcacaaaaatatttcacctccaatggcatcatcaaaaagaaaacctatcaatagatatgctgtttattcaggctcaacgattgatcaagatgaatctttgaatattatgaaggatatattagatgaagaaaataggaaggaaggtttttttaacgatatacagaaatctgatggttcttgtgaaaagcaagttgaagaaaaaattgataattattcaagaaaagaaaaatcaactttaaagacacaaaacgttcaaattgatgtacaagatgaaattgaaaatgcagctgctaaaatttctaatgattttaccgaaactgtcactaatgatgttgttgctaatgatgaagctcttgttcaacccagctcaattgcatatgttgatgaatctttcatagaaaatccttttattgatcaaactgaaattactacagaaattgataactccataacagaaactgtccctgttgatgatactgcggatgttattgatcaatcgattaaaattgctagtgctgagaattctgctgtaactgtttctaatgttgttaatgttcaagacaattttgttgaggaagctagtaaaacttccgatgaagtcagagacgttgatgagaatgaagaaaaatttgtaaaaactgttgatgctgaatctgaaaatcatattattgatgtggaagaacctattgaagaagaaccaaagagtgaagaaccaaagattgaagaaccaaagattgaagaaccaaagattgaagaaccaaagattgaagaaccaaagattgaagaaccaaagattgaagaaccaaatattgaagaaccaaagattgaagaaccaaagattgttaaatcacctccaagcttccctccagtaggctcgaatagatctgcaagtagaagtattaataggtttgatgtcaacagaaacaataaaagtgtcagaaaacaagtcaatccatatgcatctcgttatgcacaaaaggttgaaccgaaaaaatctaattatgcatatgcacctgttgaaccagttgtaaatagtgaaaatcctaatgaaactccaatatcagagaatacaatgggtgatgttgatatgtttagttttggtggttattccattcccgaaccaactaaagttgaacatgtagaagaggaaaaacaagaagaaatccatgaacaacaatcatttgcagaagaagaggagaaagaaggtgctaaaattacagtggaagaagatgccgtcccattggtacctacgtttaataaacctaaaacaatcgatttgaaaggtagtccacttgaaactatgtttacaccacctacatctattgctaatttgaatgatcaaagaagagtttcatcaccaatttatcaatttactgaagaaaaaagatatcatgcggaagatactggggagtattatgatgaaattattgatgattctgatgatgaaagagaagcaaagaagaaggaagaagagaaaatgaaagaagaagcagcaaagaaggagaaagaaaacgaaagattaagaaaagagaaggaagaagaaaagaagaaagacagtaataagaaacaaaatgataagaaggatgaaggtggtagttggtttggttggttgagtaagggtagagatagtgataagcctaaacctattaaggctaaattaggagaagagaattccttttattatgatgaaacattaaagaggtggattaataagaaggcgccattagatgaacaacttgaaacaactaaaggaccaccacctccacctgttgttaagaaagctgcaactgttcaaaatgttgaatcagttggaacaacatcatcgttaccagctccatcaatttctggatcatcaatatcaccacctgggccaccttcaaaaccaccttctgggccaccttcaatttcagcatcaccattaggtccaccaatgggtaataaaggtaaaaaggatggtattgatgaattactgagctatgaatactacacgtagtactaggggtagaagaggacaacgtagaggatatgttgatgttatggctgagaaatagattatatctatttagagttatttctatgtattttatatataaaaaattaaaaagtaataaggtatttatatttagtttaatcatctattgattgaccaaatataagatctgctagggtatcattatcattatcattcacgttatttatatccaaattagcattagtattattaatatcgtcttcatcatcatcaataataactgttgaatttgatcttgaaggatgagacagtgatagtacaagtggagtcattgggggtaaatctgtcgaaacaggcattagaattggagatcgtcctcctatagattcagataaagaatcatttcgtgttaaaattcgtaaactatttgtgttgttatataaattgttattattattgttattactattatctgtgtatctatttattgcatttttcagttgtaaatgagagaatctatttgcattagtgatatttgagcaagatgaaattgatgaatgacgaggcagtgaattaggtggggaacctctcgatagcaggaaatttgaaggtgaaccagcaagcgatattggagctaatgttggagaatccggaagaatcggctgatgttgatgttgaagttgatgttgatgttgttggtgcggaagttgtaatcgtgtgacttgatttggttgagataacgatagcagtgaaattgaagacactgatggaacagacgctatggaaacaacagatggtgagtgacttgatgaagacattgtgttttgtttaatagtttaacagtatctctggatgaatagtttaggacttcgataataaagatcaatatgactcagatggaaagaaaaattgtgaaaaatttttagtgactttagtggttgaggagtaaaatttttgttgataaaaaattacgtaatttttgggtgcgttttttttcttatcttttatctccgataagaaatttgatggggtttatcactggagattgcagatattatgatggttggtggcagggtggatgatatatgagtgggtagtatgatgtttaaagaggtttgaatgtccatatttcaatggttttttgtgtttatattgctttgtaaaagttgaataaataaaacaaacggtataatgccaaggccaatcggatactgatcgggagaaccttactaccgagttactttaaatttattaagaataattattttcattttagtactaatattatacatacacttaactaatctaatcatgcttgtcattatcatcgccatggaaatgagatttgatatcctcaactgtatcttcgatggcatcttcagcttcatcgactgcattgactatcctatcccaccatgattcagattttgtaggttccttttcatcattatcgtcatgttctttatcttccttatcatcatcttcatcttccttatcatcatcttcatctgacttatcatcatcttcatcatcactctcattctctttgtttgaattacctttgtcttcatgaacattatcaataggttttaatggttctaactttgcttgacattgttttctaaagaatgaatcttcatcgataatatccattgggaatgtaacatctggataatcgtcactacatatctcactgtcatcccaaatatcttcattaccaaggccccaattttggactccattaccataattaatttcaagagtatcacaaattaaattataaacttttggcatatcgaatggatttaaaactttctttccatctctaatactatcaaaatatttacctgtagcaataaatacaccatgtgataatgattcatcattcatgtatccattaccaataccattatttaattcattatttccataattaacgtgatacccaacatctggtacaataattataggtgcgatatgttcattcattccaccgtatactttctctaattcagttttattgtatataactcttatatgatctccaagcacattgtcatccaatctagtatggatactttctgcaatctcttgaacttttgcatcatccttaggatataatccaactatactatcacctgttatagctttgaatgcatttaaatcatcaattatgtcaccaatctcaataactcttgaatggtcaacaggaacataactaccttcagaaacaatcataatattagcatattctatcatattatatttttcaattaacatataaacagtctctatgaatacatcaatatcatttaattctttaaccaaagctttcccgtttaatttcccattttgtctaatgatatgacctaatgaattaattttcattaataaaagatttggaatataatatctttcctcattgatatcttcaccatttaaataatattctaattgtatagcttgttcctttaattcatcaatttcatgatatgagatatgctctttactactaattatatgcatccaattaaatgttaatattttcattcctgctttatgaactctatcccaaattgattcgcctatccaccattttttatcagaagaataatttttgaatatttcgtccgttgttggatcgtaaaatgtatcatcaattataccatgctgtcctggatacataccagtagataatgaccaaatattacttaaactgttggctgggttaacttgttttaagtatcttgcatagattgatttttctgaacttagaagattattcaattttggcatatttgcttcagaaatataatgtgggtttaaaccatcaattgctataacaatggttaatcttttcggagttaattcggaatcactacctggcttaactattggagtttctgtctgataaacaacatcatcaataattggagtagtaggttcaattgtagttgtactattatgagtttcggaaaattccactcccttagtctgttttgaaaacttaacacttaaaacaataacagtaactaataaaccaataattatagctattaaatgaccgaaaattattttagaacctttacctttattgagaaatttacactttctgtccttatcattgaaatagtcgaaatcaaaatcactaccaatactaccatttctattcatcaattcaatatcatcaatatattcgtcttcattatcattgaaattgaattgtgataatctttgaaatctagaattattcctaggaagtaaattactaatagctttccaccctttagtgaatatattagaattaccactattgaattggaaatcactcagttcatgattatggttagagtcgttcagattcatatcatcaatttcttcatcgtgtatacgaaaatcatcaatgtccccatcatctaaattagtgaccggtgtgtctattgcaaaccctccactcatacggaaacagttgtagaaatgtaggctgacttctgacaaagccccgatggagttaacgatctctttattaacttaatattaataagtaagcccaattacataatcagcgaaaaaaacatggtgattggaaatcgttattctttattaatactttcaaatacttctattcttagctcaatccattgatttgattaatgatttgaatttaattttatctgatttgcttttatttgaattttcttatcgttaagagtaccagccaatcaattcactatgggtagaagaaagattgaaatacagccattgactgatgacaggaacagaactgttacttttacaaagaggaaggcaggattagtttaagaaagctcatgaattatcagttttatgtcaagtggatgtctccgttataataattggtaaaaagaataaaatctatgaatattcttcaaatcatacaaatgagatactgaatgaatataagaaaaatcagaaaaatatttatgaaattaaaactccacataattacggtgattatgaactgaaaagtagggttggtgatcacggtgaagaaactcacaatagtaatagacatgatccaataatatacactcataaacattcaagttccgtaaataatattcaacaacgttctagtcaaagttttaaaaagggtcactcaagatcgaaaaagtgataatattcaagggggtcagtttaaacaaggcttgcgaaaatcaaatgataataggtatagatgacgatgacgaggatgatgatgatgatgacagtgaagatgatgaagacgataacaataataacaatgataatgaaacagttagcaacactgatatatccactaacaaacacagcgtatcagatgatatagatcaaggaccgaataaacgaattagaataaatgttgatgaggcttcatcagcttctggaatgtctccattattacctaagacgccagaaatgaaatctgataacagaacacatacattggttactccaatgtataaacgaaatagagggagtgattctcataataatgataacaaggaaaataaaaaggataaagaaaataatgccaatgttaaaagacctacactcagtttacaaattccacaagttgaagatgatttatctaaatcaaatccttcaacaataacagctgctgaatcctcaaataaatccaaggatatgtcatcaggtagtagtaaaaataatgttcattttgaagaatcttcagactctattaataatgagaatgagaaaaaaggtaatgattctattggatcaaaggaaaataaaataacaaaggaacaaatcagtagtctgaagaattttaccaataacaacaaactgttatcatcaggatacccatttaattcagcttccggtaacccaataataagtactcctttagcaagttcatttttaaaagataggaaaaatttatataccccaataacgaccaattttttgaactcattgaataataatgttgatacaccaacaaatcaaatgagttattttaatttcaatggaatgtcaccaactcaattattgactcctatgttcccattcccaatgtctgcaacaaatacctcggcacctttaaatcaacttactgattcttctaataataattcaaatactgtaaataatacaaattcggaaagttctaataatttaggattgggagtaagtaataagtggtaatagtatgaataatagcaacgcaaataataatagcaatactaatatgaacaataatcccatgaacagtaatatcaacactactcccaatggcaaatccaaaagtgattctcagtttttaccaccaatgaattcagcaacttcaatgtatttcccacaaatcagaatgaatattctcaagaacaccatcgtctttattgaatacaactacatcgaaaagttcattgaacttgtctaattacaatggtagaatcaataataataacaatacaaggctagataccataaataacaaagaatcttctgtactcaactcatctatcaacaaacacgaaagaaaagatagtaatagtagtaataataataataataataataataatcacagcaataataacggtaaaaataatttaacagtgaaaacagatggaactccggtagaactaccaagtctctctacgggtgaattatacagcttaccatcgagatatgttgaatttcaatcacctaatacattattttcacatgattggcaattaaatagtgacggtacacctattgtaagcggggcaccaccatcagttcttactcatacattaagtacaggtattaagactaaacaatcactcaaaaatgaacttgatgaagatataaatgacactttagagggataatctcacagtgtataataatgctttttacaaagttttgtatatttgtatatactaacagttttatcagtaatgtaccagataagatccttatcttttataaaccctctcaagcgcacgtgacatcattaagggctttttgattactacttgcgcgcaccacaagcaaaattaccaaattcgattcagtgcgtcgtttttcaatatccagtgataatctttgagactgttttttccgcgcgccctccactgggcagtccctacttttttccccataacatactaacagatccgggcgtaatctccaattccccagtggttttgttgagaaaatatttttttcttctctatttttcattatttccactttgacctatactctctgagaagattatacgtatttttcattattacattaaaattttagttttaatctaggaatttttaaaattatctcccttcagtagactagcatccctgactaaacatgaaggtacgtacatacatacccctatactcaatctacaaaaacgtattagtgttctattgactatattcattaaagtattcttgatctattccttgtatcaaaaattaacatacaatttgaaacaaaatcaaaagtgaaaatataaatttcataaagcacattataaagctactacaattatcaaaggacaatataatataacatgaaacacattcttatacttagaatcgccataacaagaacttttttcaatatatcaataaatactactataagttttaattttattcatattggaaacaatatactaacatttattatcctcttattttatgattatagttaaatattgcttacccaccaaacggtacccaaaaatgtatcgaaattgatgatgaacaaaaattaaagtctttctacgacaagagaatgggtcaagaagttgaaggtgaaactgttggtgatgaattcaaaggttacgttttcagaattgcaggtggtaacgataaacaaggtttcccaatgaagcaaggtgttatgatcccaaacagagttaaattattattagcaaagggtcactcatgttacagacaaagaagagctggtgaaagaaagagaaagtctgtcagaggttgtattgttggtaacgatttatcagtcttagctttaactattgttaaacaaggtgaatctgaaattgaaggtttaactgatactcaagttccaaagagattaggtccaaagagagcaaacaacatcagaaaattcttcggtttaacctaaagaagatgatgttactcaattcgtcattagaagagaaatcgttaagggtgaaaaaacttacactaaagctccaaaggttcaaagattagttaccccacaaagattacaaagaaagagagctgttaaagcattaaaaattaagaatgctcaagctcaaagagaagcagcagctgaatatgcacaattattagctcaaagattacatgaaaagaaggctgaaaagattgaaatcagaaagagaagagcttcatctttaaaaaactaaatctgatttattaaatctttctttaaaattaaactagtttttccgtgttttgtatagttgaaacaaaatatcatttatttgctgttagatttttatatatctcttactttataaataatttttaagcaaaaaaaaaatataattataatcttgttctatctaaattacattacttagcattataaatttaaataacttaaaaaaaatatcataccttacttctctttgacttattattattttcatcaggtgtaaataagtcttgtaaatttctataaacttgttcagttgataaattggtaccatatttaaatttcgattcatatctagccttttcttcttcatatttaggatctcttaacaacttattgatatgattttgaaacttactctctggtattaattctttagttataggacattgtaataacttctctttagtaattggatcaactttagaacctttactactatcttgttctctccttcttttcagtctggactctccagctgcctttattttaacaccctttggtactcttttatttattaaattcacttctttttcatcatcactatcatggctatcatttttatcatcttctacatattgtggtataccttcatcatcgttctctccctcgacatcctcttcgatattattatcatcagattggtaatcttcctctattctagcatcaacttcatcaaataaacttctttgtcctttttgaactagtgatctatactctaaatcggatttattcaaaggtttgtgtagttgtgcaatctcatcaagttgtgtaaattctatggtttcaacaagctcaaattttagccaatctatactatgatattttattctttcagctaatttcttattttcaacctctttaacttcttttctttgcttattcaaatattctgccttcttattacatctctccaaaaacttgagtttatcaatatgtgaattttcatcaacttcaatattattaattttctcttgaatcttatttttattattccacaataaatcatattgtttataaaacttttcatatattggatacattgaatgtttcagtttcaaaaattgaaattgagccgatattccattactatcattcgagtgcatatgttttaaattcttccattgcagcattaccatttactacaggcaaactgagctgctaatttaataacattcaaatcatttgatgatatagaatcttcagggaaactttctttgtcacttttcaagcttgataaaatcgtattcttcaggtttctccaatatctcttgatccgttgtcctgtatcgtttcaacattgggtatctctgcatcttcagttgaagtatcaatatcttgtttgatttcgggcagttttccagtttgtttttaaacagcttaaacagtattgatagtattcattatatggatcattgtcattcaaaaagataaattttgggttctttgattctttagttctaattttattttcaaaaacaacaccatttttattcacataaattgcagtcttaccgattaagacacgtacatctgctggtgggattgttatatccaacttttcattctcttttgtcccactcgtagagtctggcatgatacttttaccgttattgttgacttcaagaaaagattggcttaacaattcaattaagtttaaagttaaaagaaaaatcatgtaagtgcatgcgccgcatattattttgtcgaagtaaatgaagtaacatgaatcgtggctagtaaataacagatcttctctgtatctctcttattcttgacgttacgataatacaaactattagttttcagtattatcaaatgaaacgaagcaattccgaatcaggtgaactaaccaatagtgaaagatatgaatacttgaaaaatgttagacttaattgcatagactctgaatacttacaacttgttaaagattttgaaaaattttatccagatcaatcacatgtattatgtgctttactacaagactcgacagatgccacaaaggctacgataaatgaaaagtttcagttaatgtcgcaaacgaataactcaaacaaaagaatgtgtagttaaatgttgagattacacatgcaaatataaagtttataaagttaatggaaagaagaccaatgattgagtcttgtaattgtcatagatttgtttcatgatcttcacagaatactcaacatcagataaattagcatcctagttcaatgaaaagagattttgcttcttcacttacatctttaacttccttgtttaatagaaacatggtaaacaggaagtccgagaatgttaataatatatttgttttattgacgttcttgttttcaaccttcttgataaatgaagttatggtattcaatataatttcaagtgaatcttttctagttttttcaaatgtgtctgtaacgtataatttagagtaatctatatcatcaatatataataaatcatcacaaatggttagtaacaatgatgtgtaaacaaaacttgggcctgtgggaacaagtttatcatctaatgtcctttcccaaattattgtctctgttgtatcatcatctttgttaaatctttcttctaacatattggttattttagaacaaacagtctccatatatttagaatctagtattaattggaaacatttccctaaaaggggatcaattgattcagaccaattgactttaccctgtatagattgagataagtagttttccaatgtttggtatatttcatttaattgaattttctctgctaattggttcaatgtttctaaaatatagaatatttgtgtattagatagcacatttgattggaaatctagtatgtttgaaacttcactcaaaaattctgtgattagattgttcaataatttaagacttgattctgcacttcctgtgtaaatttgtttcaatttatttgataatgatatccacatttcgtccatcttcataatcatcaactgataacacgggtttcttaaccatataagaagtagattttaagtaactccaatgaattattaatttctttaatattggatttgtatccattaagtaattttggaactttatcagtagtttcagttgaatttgatgtatttaagaaagagtcaatggtaaacctactaccaaactttttatattggaatgaagttgtgttggaaagatttgacaatgtggataagatctcttctttatttttgaatgttgaaataattatatttgagatatttttaaattgatttatttgattcctaacttgtgcagaatattcagtatcacatttatcaacaatataatttattatgaagccatcatctgttggtaaagttgtcaatgatgtgaattgtttgaacgatgttaaaacgtggtttaataaaacagtcaaatccattaagttactagaggatttttcaaatctttgatcaaagttactcaacaactccagtgcgatatcagacttccagttatcaataatactttcaagtttttcttgacttagctccatatcttctttgctcaattcaaatgtaaaatctgtttttaaacttatatcagaattagagaacggttcttggttaatccattttatccattcattgaaagtagtttgtttaatccaattgtaattatcagaattattcttcaatctactaaatactaaacttgaacgacttttaatattttcaatatattgtaatgtaataaaaatgtattccaacaaatcttcaaactttgcactattgtctgataaaaatttgaagtattctagacgtttgttcaatatccataaaactgtctcagtagcactaactttttgattaacaagaaatgatgcaaatatgttggtaagaaattcattatctgcttcgtgtgttaaagttactagttgtgagtctaaaagatgattaaattccttacataattgtttgtattttgttgcagaaaatgttttgcggtgttgttcaatatcattactgaaataataatcaattaaatgtatgtgtttagccacaataagaaagtttgattgtaaattttgactaagtggttgataattagcattattatcgtcggcattgaaattcttaatacttttatcattcttatttgattcacttgataataaatttgcatttgatgaagacttcaattcatcttttatatcgtgttttaattgcattaataaataatttaaatcatgtactacattctgtagaataattggtctatttgttgtcactgctttttgtaattttgcattttcaacattttgattgaatttaattaaattgtctaaggattttggattatagtttgacttcttgaatgcaagatccatcaatttttcattctcctgtttggtaattttgttcattgtgataatttcatcagcaacattcaagagttctctatatttattaccaactaaagttttcaattcagatcttttcataacaacatcttcagataaattattcaatatcttacctatttcatcaactgaatagtctttgaatatatcactggcagatttgcctattatattctcgtaatttgtagatacctccatccaattgtgatatgtgtgtgttatttactgaataaatcagtctaagaaatgacatgttgataaaattgaaaatacaaattgcggtgagatcaacatgttgatataaatttggtgtaaacttaaatatacggtatatcagtatgaatatactaaaccaatactctaatttacaaactatttatgtagttacagaaattatacattactatatgtatcaatctttatctttgtagtaatcacgttgacttgaaatcaatgttctatgtaattctggatttggacgtcttggatgaattaaattacatttatcaccacgttcacatctgccatgactagagaagcctttgcagatagcatcttcaaaatactgtacaggtgaaaaatcacagaacattggtttcccgttataccatctatcattacatgattggtaacatcgaaatgctgttttttcatctttgaatttgactaaaacattaccacctatatgaggattaaagttcccacatatcaatataccatcaatttcaccaaaattcaatgatagttcaacaaataaatcttgatataacctatcggtttcagactttaaatagttttcatcgatatcaactttaattgtcacaaatccatcatttgaatcatctattatatctgcttgtttagataatggacctctaccgtaataagttcttataggattattaaatattttccaaaacaccacggtcttggatcttgttggccttttatgtattttagcacacttattaccatgtctacatgatccaactttagaccaaaattgacattcgtttaacttggtacaatttggtacggaattattttggtaattcttacttaccacagctgtattattttcactcattaggtatgtattattcttctctgattgtttgtatagtcctaaaggatgctgtgacaaccagaagaacaaagagtaaaagcttagttgaatcaacagacgcgactttaaacgtggtagtcatttatgtgggatgatttcatgatctcacatttaaagtctacatgcacatgatggtaatcaaactttttactattcgaacttgatattatgttaaatacatactctatataatgatagtaatgaccggaaaattatgaaaaaaaaagtgtaacctaattgataataataaaaaatgtgaaaaaataataaacaaaaaacaaaaactgaaatgcaactcatgataataaaaaacaccaaacaacaaatgtaaataaagtctgtaacaagtaatagtatttgtagataacaatttggtctacaaatctatattataataataatgaatccaaaagagtgatgcttttagatgcccaaataaaaacttctaatttatcctttctaatgatatctataacaataactttttttttaaaaatcaaaatccttaaaccatattactagctctttcttctattaatgacgaaccattaatatcactttcttctttatattttttttcataattttgtttagtaacatcaacttcaccgtgtaattcttcagctaattgttctaaagtctttctcttggtttcaggaatacataaagaagtgaaaatacctaacatcataaataatgcaaaaatttccataacatgatttaaccaacaaccttttggtaaaccttttgcttcacaaccgtgatcttttaatgtaccaatacaactttgagctagaattgcaccaactttacctgaagctgcagacataccatgagcagttgatctgtatctagttgggtaacattcaccaggaacaataaaagtagtagtatttggaccaaaattttgaaaaaattgtgcaacgatataaagacctaatctaccaccggaaccaattttatcataaccaaaaccaattgcgcagaaaagagctgttaaaataatgaaacccataatttgaattggttttctacctatcgtatcaactgttgcaactgtaaaccaataacctggaatagtacctgcacaaactaaaattaaattacctgcagcttgatgatataatgattcataaatattatcatttttagcaaaaccaatagattctaaaattgaagcggtatttaaaccaagaccataatatgcaacatccaacatgaaccaagaaccagcagtacctaataaaatcttaccatatttccattgaccaaaatgatggcagaaatctttgaatgatgcctttggtggagttaaatcttcaacttgttgagatgaggcatcttgacttatttctctttcacgttcaacagcatcttggttcttataatcaatattaatatttgaatcattcataattgcatcactattcttttcgttatcagcatttaactcagcatcctcggttaatgaatatcttggagattctggaatagttaatctaaaatataatgcaaccataccaggaacagcaccaaaaccaataataattctccaaatttgatcacaagctttaatacattcaccatgacaaccttcagaagatgcaacatttaatggacctttataagcagacacgcataccattgcaacaacaccggcaaggaattgaccccaaccttgatttgcaaagacagcacccataatagcacctctccatttggtaattgcaaattcagaggtaataattgaagataatgggtaatcagcaccaatcccaatacccatcaaaattctataaactgttaaaattgcagggaatgaaattgcaggtgactcagcagctgtacattgtaaaatagttgcaccaatcataatcattaattcaataccataaatagcttttctacccattgcatcagctaaataaccaaaacctaattgcccaataacagtaccaacagaagttgagactttaattaaagtttcagttgatgaaggaatattacctgcccaaaagacataagctaaatatgagacacctaaattaactgagaaaatatcataagcatcagttaagaaaccaacaccaccaatcataatagttctaacatgataccaaccaaatgaagcattatcaatcgcctctaatgccagtctttttctttctaatggatcttcaacatctgcaaaatcattcataaaattatgaaatgcagcattaccaccagcagtttttttggccattgtttattatttatttatttgttattgaagaaaaaataaatttgaagagattaagaagattttaaaataagaatcagttaaatctctcttttaaagcaatagaaagagataaacaaaatcaaatgttaaagaatgcagaaaacctttactttttaaaaggcctgaaaaaaatttataataaaaagaaactgagaaattatgacttactgaaatataatttcttttttcacaaaattaagttagtttttgtttgcggcgttttttaataaatgttttctaattttaaaaaaagccgcagtggcacagcctttaaataggcttaatttaagggtcctatgatagcgatgagttattggtatattcattgaagtggtagtaggaaggtagaacaacataacaataagagaatgatgaaccaatatacactatttcatgtagtaattttaaaatagacttatcagttaggctcacgagaccaaatgtgtcaaaaaaatgtgtcaaaaccgtttatagtgaaattctttgttagttatccttttttaggtcacccatctttccaattcaggaaggggttccttatctctgcatttaatttattgttttagttgattgacaagaaactgattaggatctgacagaatcaatcattcaaataacgatggaatgattcagatcgaaaggtcgaaaaattaaagattaaaaatatatattattttaaacggactttattaagtataaaattttatagtaaataagaaatgaataagagtaaaagaagattataaattaaattttggaaatattaaatgtttagcgtttaaacggattcagtccattttttcttcatcgtcagatggaattgaacgatgaacttgtttagtaatatcaacttcaccatgtaattcttcagaaatttcttctaaagtctttctcttagtttctgggacacataaagtagtacccatacctaacaacataaataatgcaaaaatttccatgacatggtttaagtaacaaccatttggtaaacccttttctttacaaccgtggttttgtaaagtaccaatacaagtttgtgcaatgattgcaccaattttacctgaagctgcagacagaccatgagcagttgatctgtatctagttggaaaacattcacctggaataataaacgtagtagtatttggaccgaaattttggaataattgacataaaatgtaaagagctaataaaccaccttcagttaatttatggtaagcaaaaccaatgacacagaaaagcatagttaagattgcaaaaccccagaattgaacaaattttctacctaatgtatcaatagttaaaactgataaccaataacctggaatagtaccagcacaaactaaaattaaattacctgcggcttgattgtataaggaatggtaaacattctttgatgatgcaaaaccaatagtttttaaaatatttgcagagttaagacctaaaccatagaaagcaacatctaacagtgaaccatgaagccagcagtacctaataaaatcttaccatatctccattgaccgaaatgagcccagaaatctttccaagaagcctttggtgggacataatttaatctcttcatctctagtttcatgttgagctaaatattcaatatcacctttatcagcattacctaattcacctgaaacaatatttaccagtatctgcagctgctttaccaatttcatttgagacatcaaaagtatatcttggagattctggaatagttaatctaaagtataaagcaattaaacctggaacagcaccaaaaccgataacaattctccacatttgatcacaagctttcatacatttttgatcacataaagcagaagaagcaacatcaagatcatgtttgtaaccagcaatacatataatagcaacaataccacctaataattgaccccaaccttgattagcaaaaacggcacccataatagcacctctccatttagttgtagcaaattcagaagtgataatagaagataatggataatcaccaccgataccaatacccataataattctgtaaaaagttaagatagcagcaaaattgatagcttcagagtgaccagcagtacattgtaaaatagttgcagcgatcataataattaattcaacaccataaatagcttttctaccaacaacgtcagccaaccaaccaaaaccaacttgaccaagaacagtaccaacagaagttgaaactttgattaaagtttcagttgatgaaggaattttaccattccaaaaaacatgagcaatcattggaactgccatgttaattgcaaaaatatcataagaatcagtcatgaaaccaacaccggcaaccataatagctctaatatgataccaactaaaatcagcattatcaattttttctaaagccagtctctttctttctaatggatcttcaacatcagcaaaatcattaataaaattgtggaacgcagcgttaccaccagcagttttataaccttgagcaggagcagtagccatctttataaaatataatttgtttatttaatttgttaattggataataatagaaaagataatttaattaattaatgaaatttattaatctgatagttgttttaaaacttattattaaacaaacttgaatgagacttgtctggtaaaagaatagagaagaaagtaagagagaataaatgataaagaggaattagggatgagtacaatatattttttcaaaacaggaatctacatcttctttataaaactctggtgtgatgtgtatttaatacagaatataatatgaatttgacatatttaaactgaacaacgtgctgacagtaaattaagatacagatacaataaaactattattcaataaatttactacaaacagaacgtggtattctccttagtagaccacttgttcggagtttctctcaattctatcaattatatcacttctaccaagccatcttcttagtcccctaggtatctaatcaggtaatgtgcggcttaatttcttttttcccttttctttctttgatggttacagccgtgttactaattccatcgcacgtggaaccctcaattgggtaatcggaagaggttactattatagtaattttaagtagtaatccactataaccgcggccagtaattgaaattataagtttaacaaaaaattaattaggtggccacgtgggttccatattgggtaagttgcggctttatattataatctgttctgcggctcttccacctttattcttattctataaaaagaaagaaacgtctcttttttttaattttatactgctacacgtgggggtgcctccgacggttaaattgaatcatcttttatactcagattgtataccggcgggccgtttagtaattacgtaattaggtcacgtgcttatataattttgcaaatagagacgcatcgagttaaagtcttacaacaattattatgtcataaatttgtaacataaattacgtaataattttttatcatgaattaagcctaaattataaacattgattaatgctcagttggaggagaatcattaattttgattgatcataatttgatttttttaatttaatctttctaaatctatcttaaccaatcgattattcaaccatgccgaattgggatgaaataattagatcagtttatcatagtgatgatgatcaatctgaggacgatgatcattttcaacaaagatttaaccttgatccaaattttaattttgaaagtattcgttttgctggtaatggtggttttcctggtttccctggaatgccaggtattccaggtatgccaggttttggcggtgatgattacgacgatgatgatgatgaggatggtaatgttatttacatggaacaatcaactggtaaaaaattagaaaaagagttcgattataattcaaattctaatattaaaaaaaattatacttgtaaagatacagatttaaataattataaaaattctaaaatttcaaaagaattaacaaatcaattattgaaaattccaactttaaaatattgggaacatagatttgaaatgttaacttttagatcaattttttgtgcattatctgataatcataaatattatcaatattttttacctcaatcatttgttgcttatccttcaaattatgatcatgttaatgatactatttttaatagaaatttttatactgaacaagaaattgataaaacaaatggtcataatggtcatatttgtgcaaaagcaattccaaaaggtcattttgtttataattgttatgattgtggtgttgatccaacttgttgtttatgtgaaaattgttttaataaagaagaacattcagatcataatgttagtgtccatagatcaagtggtgatgcaatttgtgattgtggtgatgaaacttcttggaataaaatttagattgtaaagcaaatttattacaaaataaattaaaatcaactctaaaacctttacctgaagaatttaaaaaaaatattaaaattattataagaactttatttgattttattcttgatgctaatttaactaatttccattcattgccatttgataaaaatcctgctttatcagtgtgattattttaaagattcaaatttaattaatcaagatattttaaatgaagtttcaaaattgaaaaatttacctgattataatgataatgttgatacttataaatataaatatgctgaaagggatgaaactggtaattgtgaagatttttgtacaactggtgatttcttagattataaatatttaattgtttggaatgatgaatttcataatttccaagaagctcaatatttcctttcattagctcatgttccaacaacttctgatgaggatgaagatagtccattctctgaaatggatcatttaagtcattattcacttgatttatctggtgatatagtttctgcattagctgaaacaattgataatgaaggttttgtttgttatgcaagaaataaagatattaataaattaattgaaaaatctaaaaaatttgattcctatactagaggggttagtggtttaactcctttgcatcattcaattatgacaggtagagaatatgccaatatgattatttctcgttcaattattaaatggtttgagttcatacttaaaaataaaaatactttattaactgattttattagacaagaattatcaaatactttatttgaaagtgctaatttccatttaaaagatctatctgctttaaataaattgaatattatgaacagttatttaacaactgataaattaacaattcctcaacctgttatgaaatttatgtacagtgattatacaactttcccgatttcaattgaggaaattgatcctcagttcgatgatgatgatatagagttttttggtattaaaaattgttcaagattacaatatctattcttttttgaaatgagattcccaaaatcaatgagacaaattattaaatcatcaattattccaacaatttcaaataactcacagtcaagatttgaatttgctaaacaagttgtaagagttttaccaacaattgaatataatgtagctttccatgatagagaatggagattaagtttagttgaaacttttagattacaagtttatcatgaccctcaattaggtacaaaattattagatttgggttattttgatcatataattgaaagtattttcacagttttaattaattcacaatgtttaagaaaacaaaagtttcatttagaggatgaaccaacttggcaatatagaagagtttcaaaacttttaactcatgcatttcaaggttttgatacccttttacaatttattgaaaagggtaatgataagttatttaaagttccattttttattaaaatttttagattatatgttggttatgataagctttatccaatggttagaaaatctgatgttcatcaagaatttgataataattcagcttgtgctacaactcatgcagttgcatctccattatataaaattgctgaaaatttaggtgctattattaataaaattaatcgtaaacatgaagatattgaaaaattcattgttttagtttcaagttatttgaaaattgaagaaaggaaaaagaaaactattgaatcagatagtaaagttgaggttattgattttaatattattaaagatggtgtttcagtcattcatcctattggttccttattagctcatttaaccaaaaattacaaattttacaaaccagaattattattagaatcaattttatctgttcatacttttggtccttatgatgaaagatttgttgaattagaacgtaaatctacattaaccaattttatgggtgttgctgatgaaatgttacaaccattagtttttagtgcacaatatagaactaatttttggattagaaatggtgatgaagttttcattgcacatgcaattagtgatgcttataaacaagaaaataatttttatattgttcaacaaggtattttattaaatcaattaccaattgaagatatcattgatagatttatgttaaccggttgtttctataacggtgaaagttttgataaaacaatttatgaagaaaaaattacaatgattttaactgaatttttacaattaatgtatcatttattaacatttagacattattatgattctaatttaacatatgaaaaatgtaacgatattttagataaatatcatgtttgtgacttacttactaaaggtccaagaaaatattctgaaattcatgataaatgtataacaactgttaaacttgatgaagttcttgaagaagttgccgattatattccaccaatctctcataatgattatggacattataaattaaaggatgaatatgttacatcatttgatccatatctatattactattcaaaaacttcaacatctgaaactgaagaatcattggttaaattaattgctgaattaaagaataaaaatcaaaatgatgttgttcttactccttatttatatcaattaaagggtaaagatttagctaaatttaagaaagttggtgaatttatgagaagtaagaaatttgttaaaattttatacaaaatgttaagattagcagttaattcagaaaatgattcacatttaaatatgacattacaattgattcatgcaattattcttgatgatgaattatataataaagaacaacatgatttgaaaaattttgttcaaattccaatttgtaatttattattgacagcagctgaaaacaatgaaactccaaaatatgttactaaaaaagcatcagttatattagaaaaattattactaaaggatgatgatgttctcaattcattaatggattgttttggtagtgatcatgttgaagaatataaaaaatcatctcatggtaaaactctagaaacaaaagttgaaagaaaaagaagattagcacttaaacgccaaaagaaagttatgaaaaagatgatgaaacaacaacaagattttgcagataataacacaattgatgatgaagatgtagatatgggtattaatgatggtgataataaatcaagaattactggtgaaggttccgatattaattcaggtgatgcaactgctaataaatctgataattatacaaaaattgaaagtagatgttgtatcctttgtaaaaatccagaaaatcaagaatctttatttggtgttcctggtttaattactgtttcatctgcattttggacaattcccacagttgatgataaggctccttcatttatggttgaagaatttgctgaatgttcttctagttatattgaaatccataaagatttgaaaagagcatcatgtgtaagagataagatggttattaatggttgtcctcatggtatgcattataaatgtttcaaaaatatgattcatgagaaacgtatgaagagtacaaattttgcttgtccattatgtaagggtaaattcaatgcatttattccatcatttaaatcaaatgagtttgaaatgaaggttgacacacatccagcttataaaggtctctatgaagagttagatttcttagtaactgaacatactggtggaaatcttgatgaattaagagaaaaaatttttgatgaatcatttcaagatattttagaaaattcaaataatgagaagaataaggctttggccattgaattaaaagatttgaataacaaaaactatttcttgaagagaagtttacctgtgtttaagcaaatgtctaaatatttttacagggatttagcacataattcctatttacattatagtatgtcattacttattggatcaacaattcaactacaggaaataaatgatagacgtgatggatgtgttaatgagacttttgaattacctgaaattctacgtaatacattaatgtcattatttcaatatagagttttaatgaaaagtttgaaatgtgaagaagataaaggaagtgaagaatatttcgaatttttagctgctaatccatatcttggattttctgaaacgttaattttaatgcttactgaaactcgtatgccatatcaacattgtatttcatatgcaagtctgaaagtacttgtatatacaatcgtttcagtaattcaaagatatgaggccaatccggataatttaaaaattaactcacttttgatcgataaaaatgttgagctttactacaatagtgtgaatgatttgtgcgtccaagttaaggaatatttacttaaacatggtgaaacggataaattaactgatgaagattatgatcaaattaccgaaatagttagtcgtatctatatgactaatcataaatcttatctaagacaaacacattacattttaaaattattgaatattgaatatgaagctgaaatttcagcagtagatttgggtagtactgctgattatgctaggttaccatatgcacctgatagtaaattttttaaacaacttcttggatcattgaaagttttcacaaaagaaaaggaattgcctgcaactcatcgtaaagactatgaaattgatattattgattatccaaaatcacctcgttttattgatttaccattacaattaaaagatattgcacttgaaagtactaaccaaaaacaaattgttggtagtagggatgaatatggtgaaccaatttcagttttcaagaaatgtaaatatatttgtttacattgtggtgaatggctttatgaaacatcaagtcatcaaagatcatgtgaattaagtggttattcaacattatatttttcaccaatgaagaatataattagattaaaattttcaccattaataacaaatcaagaattcactattgaatcaccatatttaaataaacatggagaaccatcaaatggtttaattggatatggtgatgctggtacattaagtaaaacaagatatgaaattttacaaaagaaatggtttaatcaatcattaattactacatcatatagagaaatgattgcagttaacgttcttagggataatgaaaatcatttattcccaggtattctggaaacagttggtggagttgaagatagaagtcatatggatatgatttcagaacgtaatgcagcacttgctagaatgttaggatatcaaccagggatggctacaacaactgatatggatggtcgaccagatccagcaataatgtttgaaatattacgtaataatatgatgggaccagaatttgatgaagatgaacctgatagtgaagaaggtgaaattattaatggtggatttatggatttcggtgaaggtattaatgttagagggggtattcctaatcctggtagagaaatttttggtaatttcttccaagcagttattgatggaaatgatgatgatgataatgataatgaaagtgatgaaagtgataattcagctctccactggtgatttacttaaatgtctagatataatagataaatagttttatagtagtaattacaagttatttttagtaaacagtttagtaattctggtaagaatagccacagcaatagttggtgtgtgcctcctaatataaattaatagagattttacagcgatacaacttagataaaaaagtgggggtgtggctcaacacggtaattaaaatttttgttaacagaattattttcatgttgactttttgtttattatgctgaacagatgttactgtgtgtacttttcagtagataataataggtgtggttggcgatgggcattacagaatattcttatttttaaattgtggtttttaaattattgtgttgatttaatctcattaattctctgttggtggaaattgtataaaaagaccctggatgtcgtttcttgcaaatgtcgatgatactcatttaaattagtttatcatttggcatctactaagaaaaccaagggatatatacaatgataaatgtattcaaaagtaattcaaaagatgaatcattatctctacattcttctactgattatataggggaagctgaatctgataatattgatgttaatagtgaatttattgagagtattgataattcggatattccaacacctgaagaaaaagtcagtccgttgggttattcagttaattcgtttagtattgttattttagttttacaaggtatcgttggtacaggtattttcagtacacctggttcaattttaaaatcaatgggatcaattggttcaacgtatgttttatggttaacttgttttttattacctcttttcagtacattcctgtatattgaatttgcaggttattttccaaaaagaaatggtggtgatgttgcatatttagaacaagcatatccaaaacctaaatttttaataccaacagtctttgctgctgtctcatgttgttttatcatttacaacaagttctgctttagcatttggtcaatatattttatcagctgctgaaattgaagctaaaacttggtattatcgtggtattgcaatcggtattttaactttcactgcattatgtattgcattaagtactaaatggtcattaagattgcaaaatttattaggttttgttaaagttgttttcatgttatttatggttattttaggttgggttattttatctggtaaaactaaagttcaagatccacatcaaagtttccgtaatgtttgggaaggtacaactactaatggtaataatattgcaaattcaattattaaagtaacattttcttatagtggttattattatgcatttggtgttgttgcagaatttaaaggtaatgaaaatgcctaatagtaaggaagaaagaaagaaacaaatgcttaaaactttttcatggtatgttccattatcattatttgtcatttatgttttatatattttaatgattacagcatattatgcatctgcatcacctgaagaaattaaaggatctggtaattctgttgcaacacttttatttaaaaatgcatttgaaaataaagcggcaacaaaggcattatctgcaatggttgcattatcagcatttggtcatttaattacagcaggttttatcacattcaagagctttacgtgaatgtggtagacaaggggttttaccattcccaaaattttggacttcaacaaaaccttttggtactccattaggtccaatttttcattacttggttagttaattttattatgattgttgcaccacctgcaggttcagcttataattttcattgttgatatgggtacttattcaaattatatctttacattacttttagttgttggtttattaagagttagaagagatagaaaattaaagggtttaggtacaaagggtcaatatttaccattaccatgtattattattttaatattatttgaattaatggttattgcaattgcatttgttccaccaaagggtacattaattggaagtgatgttacatttttttatgcaacttatccaattgttacaattggtattttaggattttgtgtctcatattatgcagtttggcgttatgcattaccaaaaattggtaattatgtacatcgtgaagttatttataaacttgaaagtggtgaaattggtaatacagttgttaaagttaaaattgatgaacttgaagaatgggatagagttcataatacagattctaatggggttggtgttgcaaaagatttaggtgatgttgcagaaaatgatgttgaagttaacattgaaaaaattgaatcaagtaagagttaatgaactatttttttaattaagagttttctttttatttaatttgtacatatttttgaaaaataataaaagtttctatattaaaaagtaagaaaaaggtatataacaaagaaaaatattgaaaaatcgttaaacgggtatcgtagttgtagtttcagccaattaatgaaccaatactttctctacctaaaattaaaagattattctttctatttgcactggttttattgaaaaattgtccctttgcttcatcccaatcaccaactgttattctttgtaaattttcatctctcaaaattcctttcctatttaagttttggtgaattaatttcctctggatccataaaaatatctaatcttggtgaagcaaaataaataattgttgatctagtaaaaccttgttgatccgctggagctgtatgaactctatgaacagaagatttaaaatatcctccagttataaatttcattgtatcaccaatattaacaattaatgcatcaggcgtatgtgaaacatatttccatttattatcatcatatgtacgaacttgtaatgaaagaattgattgtgataaaatataagtgagaccaccagcatcggtgtgacctcttaaccaagttgaagaagttttattattataatcatcattaactggatgatatagtaaaaatctaccaaatcctgtacctgattctcttgttttgttttcaataacttcgaaatatttattatataattcaccttcagataattctaatataatatccattaatgttaacacttttctttgaatttcagtatgtaagataactgaaaatactcttgaatttcacttaaatgttccttaacaaattcagggtatttaattttattgttgaaaaatttcaggatgattaaaatgacggacattataaaattcaacattatccttagtttcatttgtataagtccaataaccacgaggtttaaaacctgtacctctaataacgccctaattctaaacccttatcttcatcaataatatcttttcctgcaaagaaatttgcctttacttcatcagttgtttcaaaagttgattgacatattgatttcatagtctctaaaaattcatgagaaattccatgattaattaatttgaaaaatccatactctgttaatgatttctctaattgatttgcaagttcttttcttgcttcaatacctttatcaaactttgataaatcaataagtgcaatatctaatgtatcaataacttcctttgaaggtggtgcttcaataaaaggacggaaattatatttttttctaatatcttccttagtactcatttatcaaattggttaacaaaactgtggtagcagcttcgcagttgtcccaaaaaggtgcaactagtccccatttatatacacattacacacaaatgactcatctcttatcagataccacactgataacatccgataagatactttatgatggttaaaacaagggcaaaccaatgagaggcagaaaagtagaaatgcatccacaatagtcaccatagttaacgacgagccaccacattcttatcgaaaaagccactgttttcacactttattttatagttatctgtctgttgtctgttataagcgttatcggcggttgtgtggctaattcatagatatgtaggtaagtagataagtaagtgataagtagattatctagctgttaaaattgtggttttagaatggggtaattgtaggatttgaataaggaaaattgtagataaaaggttaaaatgttccttattgccaaagtataatatgcagtccagtaattcttagccgtatcacagatcagagaaatatggtttggagctttatcccacatagaagatacttgtctgaagatttagttgagcctttattggacactcaatcagatactgaaattgatattaatgttaatacaattaatattgaagaaaaaactgatgaaaaaaattatgaaaagggtgttattgagtcagatactgattttagataaaacatcaactaatgaatcaaataattattataaatttgaagattctgatggtaaaacatatgaaattagagaatttagagatgaagcagatagatcaatttggaaatttttcgatgaatttgaatatagagaaacaaaggaagaatctgctaattataaatggtataaatggttccctgatggtacaactagtactgaaaagaaacttttatttaaattagatattttaattgcattttattcatttattggatattgggttaaatatattgatagcgcaaatttgaataatgcatatgtttcaggtatgaaagaagatattggaatggttggtaatgaccttattaatacacaagttttattcactgttggacaaattgttatggaagttttttggttatttgcattacagaaagtccctgttgtttatgcattatttggatctgaactgtgttggtcagcctttcactttaggtacatataaaattaataatgttaaatcattaaaggcaattagatttttagttggtgcaagtgaagcagcatatttcccatgtattcattatttattaggtaattggtatttaccaagtgaagttggtagacgtggagcagttttctatggaggacaatttttaggtgttttaacatcaggattattacaaagtgcaacatttagaaatttatcaggtattcatggattagagggttggagatggatgtttattgttgatggttgtttatcatttgcagttgcaattttagcatatatttgtgttcctggtataccatcaaaatgttattcaatttttttaacagatgatgaaattaggttagctagaaagagaatgattaagaatggtacagatttatcaactaaatcatcaccaatttttgatttaaaagtttggaaaaaagcatttagtacatggcatatttatctattaggatttactaatatgttgggatttaatactaataatacatcatcaggatcatttgttttatggttaaaatcattagataaatattcaattggaatgattaatgatttatcaactgtaccacctgcattaggtattttatatgttttaataatttgtgttggagcagatattacaaggaaaagatttttatttattataatttcatttttaatgaatttccttggtaatataattttagcaatttgggatgtttcatatggtgctaaatggtttgcattttgttttggatattggtcatggtcacaatcatcagttttcaatccattaattagtgattttttccgtaaagatgcagaagttaaaactgttggatggatggttatttatattattggattacaatcaagtgcatggatatctaaattaatttggccaactgttgatagtccaagatataaagttgggttctcaacatgtgcaggttttagtattggattctgtattatgatgataattgcatatttcctatataagagagatgaaagaagagaggcattggagaatggtatctatgtgtacaatagtaagacagatactgttccatccttcattactgatcgtattgatagtaaataatataaaaaatttaaaaaaatataacatattatatattcaaacaacctttataactcttataaaataatcatgtacccaaacacgacaaaacgcatgtcatggtgaaaatttcatactatgtaaaccaatcagagtgttggaattgctaagttccctctctcgcgccatagtaattatctcttagttgaaatactccactgtgaagagtctgtctgttaataagaagttcttaatactttaggaattggtatatctgtatcgacaatgtacactcaaatctacaacttgatcttcaagagaaactccacctttgttgcaactgtctttgcttcaactttcttattccaagtcggtttagatgaaaccgttacttcatggtacgaagctagaaataaaggtaaactttggtctgatttaaaaccaaaaattttagctggttttgaatctgaagaagatgaagaataaatgtgttggtatatataccatcatatctctttatttatttatctatttaattatttaaatcaagaaatgtttaattcctttatatattacaataccaatataaaaattcatattagttaattaatctttattttacaagagttgattgttgttatacatgtatttatttattatttattatctattaatcattatttatccttatttaacaacaatcatttgtccaatatcatcatcatcatcgctttcatcttcatcttcatcttcatcttcatcttcatcttcatcttccttttcattaacatcaatctcttcaatcttttctaacatatccttaatctcatttaattcctcctctttatccttttcttcaccttcatctctcattaacatttgaactaatctatcacataattctgcaagtttttcttcattactttccttatgtaacttccctaattaatggataaacacttttctctcttaaaagttctctaccttgtcttgttgaacataataaaagtaaactctctaaatgaacacaaattatatcctttaatggttccatctttttatcttcatctaaaaattgtaattcatctggtaattctaaaatttcttcatcacttaatcctttattacctggtaatgcaattggtcctaaaatataaattaataaattaattggttcatctaaaaataacatatgtttctcaatatcaaataatgaattcttaatagttgatgcaactccctctcttctaacttttgcatcatatttttcagtgaaaactaataatttagttaatggtataatattatcatattcttgttcagtaacaaaatattcacgtcctttcttaaatcttgataaatctgcaaaaaaatatgataaataatcataaacaacatatttattaatttgtctttcactacctttaacaaacatatccaactaaacaatcaatagctttatcacttttaaaaatttccttttgtgaatctaaaatattaattttaatatcgaaaacttttaatatattatcatttttagctaagttagctaataatatacacattaattcaccattaatattaactggatttggtaattgttcaataataaattttaaaaattctgtatctttacaaattaattcacgtaatttttcatcatcacataaattaactaatatagttaatgcttcattaactgttttacctttcttttcatgtgttaatttgattaaatcttcaattgctctacagttatcatatttgaaaatttcttgttgattatttggtccaccagctgaaaattgaactaaattttcaagtgcaatctctctgacatttaatgcattatcatgtaaaaatccaacaagttcctcaagttcacttggcatctcgaatatagtttatagtttatagtttgttatcagaactattatattacaaaaacttaaaggtataaaaactataaaaatttaaaaaaatatttttttttgccaatcttgaaaaaattcatgtcgtcacagttaacaaaaaattactaatattactcttttctgtgaacttgcttattttgcagtgtaaaattgtcctttaatatcttctttaatgtatgtttggattcaggatcacgttgcatcttaggacgtaatgccttgaccaatgctgacagatcaattggtccattaactaataattcatcaatatctgcctttgtaagcttatcaggattaataccattatttccattattttcatccttgattattggatctttaatatcttcatctgttatttctctatgaattgcagttctaggattccattctccaatagggaatttacttaatatacttttaacagctttaattgtaataaatccactacgataattatcaacataaattttcttatcattcttctttctcttctttcttggactttctgttgtattattagtattattatcatcattgaaatcatcagttggttctgatttaactttaatttcaccttcagtaggttctgtgttaactttaacttcatcttcatcactcttattttcaatatcactatctgataaatatggattttcatcatcatcactcgcataaacttcattcattgcatttttacttaatgccattcttaatcttttactttctttatcttcaggttttacatcaaataaatcatccatatcttcatcatcatcttcctcaattgggattttttcaattaaattatttgcacttaacatttcctttttcatctttgattcaattattttcttttcttcatcaggtccttccataattggtgcttcttcatcatcttgaaattcatcatcaaaatctaaatcttcatcttcatcagattttttaataccattaatatcatcttcatcatcttcaattgttaaatcattttcacctttaatttttggtacttttctatatcttaaatcaactcttttaccagttgttgcttcatctaacatttttctcattaaccatctttgacctgaactaccttgtttcattttagcttcagcttcctctaatgttaaagttgcatatttatttcttgatgtaaatttataaaatttttcaattggagctaatttaaaacatttattttccttatctaatacaagcatacaataattatcacttaaacctgcttcaaaattaccaacccatgcttgacttgcatcataatcttctaaaatccatggataaaattcttcatatcttaatttcctctttgcttcattataaactttaacttgttttgttctcttttgaaatggttgtctctttttctttcttgcaccaccatcaggtgcaattgcttgtaattttttctccttttcaagttctttctcctttaattgtttcattttccttttatcttcctcataggcaattctatcttcttcatttaatccttcaatttctaattcttcatcaatttcttcatttgttaaattatgtttacctgttctttgaacaaattcttctcttttcttgacttgttcctgtgccttttgttgatcaactttccttttctcatctaattcctttaatgacatttgaaattgtaaattttttggatctttcctatgtaatctagttggtggttcaaaatcaactaatggatcaatttttttagcactatgaaattttaaaatatgatatcttgtctcatcaatttcttcctccgtactagccattaaggggaaaaacatcatattccaccggtggatttgatctgttcatctttgctaggttattaaaagatgcttataaacaaaaagtgaattcaaagtggcatttaaattttgaaattcatgttaatagttaatatagcgaattgtttaaaagttttcaattaggtggattctttcattgtaatatttcttttggaatggttagttatcaacatgttttatatgagtatatcatcaattgagtgtggatatagatgtttaatgattgggaattgatagcatcaaatatttagagatttaaagacaaataaaaatgttcaagtgtaggtatagataataacggaggatgattagtagtgaagtacatctcttaatactataagtttttgtaaaagtaacttctttagttaacaaaatgtaattgagagcttcttagtaatctcttttacttataattgtatacaatacacaatgttatgaatgtaataaaactactgtaaaagactatcttaattaaagttgaaaatttcatggtgattttttcttagttgagactctgtaagccattaacttagtgatacacttcttctaatggacaatgaatcgagataaaagacagatattcacagccttctaaaatacataatgataaaatactagactactataaagatatttcatgtcttatatttggatcagcatgtggaattctacaattaaaagcaattaatggtttaatttatttcttattaacttcattcatgtcaagtttattatttcattgggcaatgattacatttagaaataagcaatataaatatggattaaaagatttttatattaatcctataagtgaagtttatttaggtaatattggtaaacaaattgcaattttcacaatgatgtggtgtctattatctgcattaatttcataaatttgttaaattttcaagtaataatgatgaacataatgatgaataagctagtattttatctaattctaattcatcatcatcactattagtactatcattattaattgtacttgatttgagagaatttgttttgaaattaagatatgctaatgaatttaatgcatcctttgcctcctttgatttactaacatcaatttcaccattttcaacttttcttagaaattcaattgctttttgtagtttagatgatatatgattaagagaattcgagatctccttattgttatttgattgaattgtctttgaagatgtttcatatgttgatattgtaatattctcagattgaagtaattttaattgatagtttattatactggtttcagttggtattaatggctttatatttatataatttgataatttatctatagatgtaatattatctaaatcttgaactgtcatcaatactaaattatcagtattttgattgatattttgtagattcgatattatcgtatttgaatcaaattttatattatcacaatcaattatatagaacccaattaactctaaatatccattcccatatatctctgataataaatctaaatgatgtttaagtttatcattatctattattgattgataatctgaatcaaatgaatttaataatgatattgaattattgattttattaaatttacctaatattaacccacatatttgacttgttgttatatttgatacttgtatacggttataatgatctgatattgacagtaataaagttggatgtatcaatgcttcagtcattatatcttggtatatgtctattagaaaaaacaacaatttgtctataagagaaaaacttacatgctcttaaagattgtaaaagatttttgaatcttttatggttatttgttgtacatgtaatattataagttgagttaacttgttacaaatttattacatatagtaaagcagtaaaagtagggtatatgtgtatataaaaaattattcaaaaggaagtatcaattaatcttccataatgatatcatcaacatcttcaacgattggctgttgattattaaaatttagagaatcgtagtaattatcatcatactggtaataggatccataactactcatattatcacgtaagtatttctctctctcagctaatctattcaattcttcctcatcatcatccatcatcatatcatcgtcttcatattgaaattgttcttgattatattgtagatcttcattatgaggtaattctgtgatttgattacttgtgtaatgtttctttaaccatttttcataattatcccaaacaattttcaatggattataatatttaattaatgaaaaatattttgctaaataatcttcccatattaaacttgtatattatatcattaatatctttattttccttattatttgatttatattgtgataatatattattccaagctttctttaaatctaaaccagatgaaattattaatttatctaatcctgccttctttaaatcatttaattgtaatttttcaccaataaggtctaattgatcaggattttcatgtaagaattgatcaatattccttataataactttattaggatcattcattgaagcatttatttgttccggagtatatgttccaaacaatggtttcctccttgatttattattaccaaatcctaaagataatccattgagatgatcaactaatctccttttcactggatgatgatgagcgtcaaatgtatcataagtttccaaatgtctcttgtgtgtggtgtcctgtgtatggtattcaaacattgatatggtaaatatacaatcccttgttctattcctttcttctctccaaacaggttaaatcttctttaaagacgtttaaacagagtcgtttctttttaccagtggaaaattcgagaaattttttactatgggtcgctttacctgcctttttagggaaactatctctatctatatggatgattcacctgttggtgatgatagcaatggtagtatttgatcttcaatatactatctataatatacaagtattaactatataaccccctttttcccattcttttctctcctcttgtatagtcttaaaactaccatttccaaaactatccttcatcccccaccatttaaacaatgaatgctttaatacagcattaattatcccatattctcttaataaacaaactaatatgtaataacatgtggctaatgtacctccaagaagtaatccaactataacttgattccaattgtgatattcaaatataattctacttgcaacaacaattgcaactaacaatccactaccaattgtataaaccatcttctcaattctattcaaaccttttggccaattctttatatacatgaaacatacataaacaaaccaaaatgacataaattgtgaatgtgaacttggcattccccatactaatcctccatcctttttaaatatttgtccattgattggacgtggatatttaactaaatttttcaaaataccactaattatatcattacatacatgaccagctgcgaatatacatggttcaatctctcttgttatcatatgccatgaaaataaaaatactaatattagtattggcattaatgaacttgcagctaatggtaatgaccaagcattatccggtgagtataagatatatgtatgatcaaatggaacaagtgttatgtctttattactcatttgcttggtattggttgtataaagaaagaagagcctgcatagatccaatcttgaattttaaaacacgtaaaaatcatcaacatgattttttgaaatttttcaaatttatattcacttttttcctcttatcaatgaaactaatgtccgttgataatagaatacgttcacttaatgatccagatatctcaacaaatgatttattaactactttaaacacattgcactctcaaaaatcattcacaaataatcaatcaattcaactatgttccatactattaaataaaataataccacaaacttttaaattattgaacaatcagtcacaaaatgtcatttatgacttattatctaatagaaatcggtagttcttcaacttataagattgataaataatgaaaagaatactgttaatataaaaatattgttgaacataatatctaaaaacatcccattattacttgatgatctctgtaattctacaaaagttgatcttgaattaacttggaaatcattgctaactcataaaatatatgaatctttagggtcaattctagtttatttatttgatcatacgctggaagatatagatagagattatgtcaagtctattatggatgtttatcctaaaaatatttatgtcaaatcttctacatttacagactaatgatcatgatccaattaaatgcaataagatatattattgtatatttctcaataaaggggatgatgaatctacttttaatagtgtttgaaaactggaataagtgtattgaactattcacacagcctaaagaattacatgctaaacaaaagtttcaatttactgaacttcaaaataaatttttaattggactttttcaaccaaatgaactcaaatgttaagtattgagtcatctatttattatattcaattaatcaaatcacttttgaacaaaatcaaaccttctagttataaagaatccatacttaaatcatgtcaagataatgacaatgtaatagttaattttatttggatgaaaaagtattggagctgtgaaattgaactatattgaagacctcatgaacaaatttggtaataagaagtatatatccaatacgactaccaacgtagcaatcaaatatgacaagatttttaatattactactctctactctcaacaatagctcaattaaatcaattatcatgtaataagttatttttagacactattacaaatagacttgaatctaaagtaccaatatttcagagagtttggtatgtatgttgctgattatatttatactagaataaatggtgaaccaatgtttaaaatttcttcatatgaaagccaataaaaaggaatttatgaaattaataaatgaactgaatcaacaatctcaaattgaatctactcctatctgactgaagaattaataaatgaaatacaaaacacttaaacaaattgaaaaaattgaacaaactatagtggaaaaagcaaccaattatgattgaaatgaattatgaatcagataatgatgattctgatcttgatgatccaacagtttctagaaacccaactatagctaaacctgtttttcttgaaagatttattacattacctaacaacaggatccacaaaatgataaaactgcctatgagaaaagatcaatagcatttagtattggtattgaaatgataagaataaagaaaaatacgcctgaattgaaagtactatgctactaaattgattgatgcagctatggatcttgatagtgttggattcccaataaaggaaaatgaacaatttaatgatgatgatattaaaatagcatttgattcctggaaattatctttcttaattgctatttgtacctgtgaacctgatatagtgtttgattatttcttaacgaatttcataaaacaagattgggcaattcctttaagagttcaaatattgtcttgtattgggttgagttgtagagaattatgtggtagagatgatgacttcatttggggtaagaagaatttagataaagtgaaacctaaggagctcacaggcttggctcttgaaagttttacaaaattagaacaaatgaatagtagaaaaattgttgatttggatcaattagagaaagaaaacaagttagtgaaagcgttagaaaatactgttatatcagaaggtactgttattcatagatcaagaaaattggatattgataaagctcaatcaatcaaatctacaaatactacattcattaataaaaaacttcctaaagtattcttttcaatgattgcaatttggcaagaagttaatgttcatacatatggtaatggatttgcaattggctcaatgtctgaatatttgaattctcattatcttgatattctatcaatggtatattcatgttcaattccttcgtgtataagtattattgaaatgacaattgaagaaatttctgtacttattggacaattaagaaatattcaaacaacttcttatttagaatttccttcattacttttaaatctattatcaatagtttaagatcattaatatttgataatgctaaaacgctaaatgttatcaaatcatcaaataatttagaattgactgcattattagaatcttatgcacaagtcttatcacagtctccaccattagatgaacctttaaatactcttagtaaggctgttttggaacagttgcaacagtattctattttgtattcctaatatatatcctagatagttaattaatacaaaaaatttagttttctagagtattaataaaatatacattgaggctgttaactatttgctacctgttaattctttaatattactgttttttactttttaggtggctcgtcattttaaaactattactataacttttttaaaaagtgatatttctattatttttaacttggatattaattcttagcattatcaacaccctttatacagctttatcttgctaaaacacaagtaaagcataagatatctacaatctttgttaaaatagcttattctgtgacataaaatttgttgtgttttcaacatgataaatgcgaagataatcaaaattttgattgttgacattttaaaacgctttaacacgaacttgatatgcattctttttgaacaaacaatggcaccctcagtacaaacagaccttattaaccgtcatagacgtatattaagacacagacttaaaaaaattaatgaggagaataatacatcttatagattgggacaaaaaaatatagatttattgttttatctaaactacataaaatttgtaaaagaactagcaacaaaggcgaaacaaattgcagaaattgaaggctcatctgaaataatgccacaacattggaaagaatcgggagcagaattattggatacttttgatagagaaaatgaattaaaatgatgataataatacaaagttttatagagcttatggaaaatatttacaaggcggtttttgatttattgtaattaaacaatacatttattcataaaagaaattattcatgtgaggagactttagtatctcaacattttctattgctaactcaggactctccttgaattgaacaaacaatccctgtaattgtgcagtactgacataaggtaattccaaatctttgaattttttcataaagataggtaatttttccttatcatcataaaatcttaagaacatttgctcaacttgataatctgatgcattattaattaaaactttcttatcgattcttccaggtctcaataaagcaggatcaagtctctctggatgattagttgtcataaatgttataacttcttcagctgatgcaacaccatctaatgcatttaataatccactgaatgttacacctgatagatatcccttttctgtgctttgagaacgattgttgaatgctgcatctatatcttctaataataaaattgtatgttcgggtatattgttcatcaaatatgctaatctatcatctgttaaattaggttcaccaacattcataattgcaatattataatcaaattcaccagctaatgcttgaatgaaacttgttttaccactacctggtggtccatataataaataaccacgacgatatggaatacctctatcatgataccatgaaccagattttaaaaattcttttacatcagttaatatatcttcttttatacctttatcaagtataacagaatcaattactctctttgatcttggtttaccaaaaattctccaatcttgaccccatgatttatatagaacagttttaccttcatttaatttcattgccatttgtcttgcttcatctaatatagatgctagtaaatatctatctttgtataacgtctttagtgtaactgtttccattggctgtccagaattatgtattctttctgatctttcacgtgaaacgaaaaaccatgaatttttatatttaaaccaatgattaccaggtcctggaacaaatgaaaatccagtcatcacagatccattttgatgttgaacaaaacttgttttaacactcaattgtcttgaaatacgatttggataatttgacatccaatttaaaaaccaatcatatgacttatcactatttctgatttctaaatcaacaattaatctacgatacattaaatttgcaaatgatccaacacctttccttaaaatagaaaaacctgcacctaataacatcaatccaccaccagctgcaaaatatggatttgatgcaaatacttcttttatattaaatggattcacatctttcttgacgtttgcatctgttggtgaattatgtggatgattatagttcaagagcgataaatcttcagttgatggagtttcaataacaccttccactataactggatcatctgagactttatgaccttcaaaactcgatttatccccgcttaaccaatctaaaacacccatactttgacctatcaagagcagaagaaactttgtagaagatcacccaagaaggtcaaggtgaaaaatttgtattatgtaaccaagctgcggattgacgaaggcaactaaacttgatgacgttttttttaatctttacacccatattttccttttgattcgacaccaattcataattcaattggcaagattaacaattgaaaacttatttttggattgaatttgaattaataacgaaaaacaatggaaatgacaccgaaaataccagatttagagatcgatgctgatgatgtgagtgatctcattgatacaaacaagatcaatgataacattagtaaagatttacaagatcaaaatgataaatcaagtcatccttattcatcacttgcaatagcagtggatgcacaagaacagttaaatgcacaaaatgagagtgaaaattcccaattagataagggacacggaaatggtaatgatattaatgatgaaataccaattgagacaaaggagccagaaaaggtttacgatttttcaaaagctatatcagtgaaaacatcagatagaatcttagatgatttgagatcagatcctttatttttactgaataatcaggaaggtattttatcttcaccaaccacccattatgctagtaaattatctaatttggcaaacaattcagttaggtatagtcctgtattttggaaaacatcagttccagtgattgcatttaaagaaagtctagcattggatgaaaatacaacattggtgacattcacaggattacttgtaccgaatacaccaattagtaatttgcaaactccaaagtatatcactattctataagggttagataccaaaacaacagagtcaacgtgaagaatacattttatggtttcttagatgactgatctttatgaagatgataaattttgggttgagaataatgatatactatcagagggtttacatatctctgaaacctctatgaatgtcttactgaagtctctgcctcatgtttctggattctgcaaactttttgtcaaaagataccggaactttaataagattagaaatttattcaagcaatttttcaagcatggacttagagaattttgaaactgaagagattcaatcaagaatagcaatgtttaattctcaaacaactgatggaaatgcattcaatatgataaacctgacaccatatgattgtttattaaaattaaaaagtgttttagttggagcattgaaaaatcaagaatcacctaaatctattgatttagattcaaccagactttcagtgtttctagatattaacttattatttgataaattctttttctccttatcagaaagagatggtcataatgcaattaatccagccgatttccaaactttaggagagtatgcatttgtatacagagatttactcagaagatgtgttttagaagttgtttactacattggtttaacatcacctcataaaaatgaaatagccaatttattttcatcatcattcaatgatgtttttgaaagtataggggagtttgattacacagagcaaataaaaaattggaacagttggaatgatcagttttatgcagaagcaatgttggtattatctgtcactccatattataaagatcaattagtccaccatatttatgaaacattagtatccagtgatccagccagtacacctatttactttgacgctttgacgtatatttgtacttcaagatatacacaagatattcaatattatgtaactatattaagaggcaatggtatgttaggatttggtgagttgaaaaacattttcaccaaatttggtttcccagtgaatgattgccactcaatgagcacaataagcgatgaagatatattgaatgcttatcaaaaccaattaattgttgcaagtagtaaatatgagaagaatacatttagagatatgttgaataacatagcaaaatatagaacaagtaacaaattaattgaatatttgaacacagaaccatattttgatgttactgatgcatataacttacttgaaatagatccaaagattgatgattcattactcattacattttatgattataaagtcagtgagaatgatatgaattttgatcccaatgttgcaagagctttttactcaattgtattgagccggaaaagtgtcactttaatgaattatattgatatgaacttaccacaattcagtagttctgaaatttctattgatgatgcatataatataattggatgtttacaaacagctgatgatttaatgattattagaattttccaagaacgtgttgcaaaagatactggaacagattttagatcattatggagagcattgaagactattagagatcatagaaggtctaaattactaaatggttatattactagtggtattgttaattccactttgttatcagttgatcaatcaccagctggattgaataatataggtaatacatgttatttgaattctttactacaatactactttgttattaagccattaagagaatatattttagggtttaatgaagtttttcatgctgaagattttgagaatgacgaaaaataccaaactagaagaattggtggtagaactgtaaacttgaaggaaactgaaagatcataccaattcatgtatcaattgagagatttatattaccacttaattcacaccagtgaaaaagacgtgacaccttcaaaagaactagcatatttagcattcagtcctattagttttgaagtcgaatttgaggatgaaacagaaaagaagattgaagtagctagaaccagttgaaaaattaggggatgatattaaagctgaagaagcaggagatactgaagagaaaaatccagaggagaaacaagaagaaaataaggaagatgcagaagaaaaaagcaggaaattcggagaatgcagtaattaatttgagtgatgatagtacatccgacgatttaagtatcgaaatcacaggtagcaaagatgtagaaaagccaattgttaaaaaatctgcagccggatgtaagattagtgctgatcaatttgaatgtgcatttgaaattggtagtcaacaagatgttactgaatgtatctctaatgtattaattcaaattgaaagtgctatgagaccagatttgttagatgagaataatgaacaaattgacatgattaaaaaattgttctatggtaagactaaacaaagattagtaccagttgatagttcaagtaagaaagaactagtagatggtaatgtcagaactaaagttgaaagtttccttaatttaattgttaatattggtgatcatcctaaggatatttatgatgcattagatactttttttacacaagatttaattgaattggaagatggtgaaggttaagagatcattaactatttcagaattaccaaaaattttacaaattcaaattcaaagagttcaatttgatagagttagattaattcctgttaaatccaatgaaccaattccattcgaggagaaattatatatggatagatatttagagaccgatgatcaaataattatcaataaaagggaagaagtattcaattggagaagaagagttgcagagttaaatattagaaagaatgaaattttaaaagttaatgatcaaggtttaaatatgctagatgttttacaaacaacccatgactatttaaaatcattagcagttcaagaagaaggtatcaatattgaagagaatactatcaatgttatcgaaagagagattactaaattaaaggaagagaaagttagtatattaaaggaaattgaagagttagataataaaatcaacttacaattcagtggatttaacaaagttggatattctatttttgcaatatttatacatagaggtgaagcatcatatggacattattttatttatattagagactttaaatctaatgtttataggaaatataatgatgaaattgttagtgaagttagtattgaagaaattttcaattttagagaaggtaataatgcaacaccatattatttatcatttattaaggatgaattattagaagagattacaccattagagagggatattatgattcaagatatgttagaaggattagttaccgaagttgattgaatgtaattgcaatgtaacttagtttattaataataatagagcttgatcaatatcacgtataatatcttgataatcctcacaacctacactaaatcttagcatatttttataatttaaatcatttgaataaataaaatttggattatttgtaattaattcgactaaagtttcaccaccttccataacaggatttgtacttaagaaattaaattttttcagtaattgacttgggataatatcatttatgaattccaatgcaaaaacaggattataataattattcaattgagatttaattagtgatttatttaattgtaatgatgaatgatgtatagttttcaaagttttcttatatttattgaaattatcaataagataatttataattaattttgtattatcacattgagtgaaaattctcattttataacttcttaaacttcttaaaagcaagaaactatcaaaattagcaattgaagtatttaatgcatttctttcattaattaaacctaatttatcattttttttcaaagatacaataaaacctgcacttaaatcacttacaccagataaatatttaacagctgaataaactataaattttgcaccatgatcaaatggtgattgtaaaggaggtggtgccaactgttgaatcaacaattaaataacactgtctttatattagagttttcaattaatttagaataatgtgaaatatcttgaacataaccgaattggattcattggagattctaatatgataacagaatttggtaaaatttcaatgttttctaataatggtataattgataggtttgttaattttttcagtaatttaacaacattataagtaccctttgaacctgaatctgatatataaatagttttaggattaatatatgttaaaatacccataattgcagatgatcctgagttatataatgttacatgaccatttgtgatatttctccaagatattttcaattgctaatgtagttgaaacacttgatgttggaggtagctgatgggttatttgatatcgtttgttgttgataaaattgttgttgattttgttgaggtgggtattgttgttgtaaaattggtggagaaatcggttgaattggaggtgaaatttgatcaataccatccatcatccaatcaaatgatttcatccaatcatgagaatgaattaattttgtactgaacccaatatccaagatttcttcctcattattattattatcatcatcaagaatctcattattatcaagcttttcatgccgtattcttttataaactggtttcttcttgaaatttttcaaattcggattatcattaaccaatttacgtaattgatattcatttgttaaccaattcgataaagttgattgagatatttttaaattagtataattattgaaatactgtatagtttctctctgagtatgagcaggtggaccatgtaagtagtccaataccgatagtttctcatcaattgtcagtctcatttggttattaaataaagaaagatgatgtagtgaatagtcatgaaaaagattacgtaactcttctttttttccatattagacgaaatttatagcaacacaaccaaccggtgataaattattgttattacatgtgagatcaaattggattcggtggctgtttcttagagatctcagtttattattggacaatgagtggcctcagtagaagacgtggtaaggaggatagtaatgttgactctggagacattgatgatggtaacattgagtctagtttaccatatttaacccttttagaggaagttttattaattggattaaaagatagagaaggatatctttcattttggaatgataatatttcatatacattaagaggattaattttaattgaattagccctcagaggtaaaattgcaatggttggagattcagctagaagaagatttgaattaaatgagagattaattactgtaattgatagtaaagcaacaggtgaaacattattagatgaagcattgaaaataatgaagagtgaaactgaaccacatagtgttagttcatggattgatttattaagtggagaaacatggaatttaatgaagatgggatatcaattaaagcaagtacgagaaagattagctaaaggattagtggacaagggagttttacgtactgaacataagaatttcctcctatttgatatggcaacacatcctttaaatgataataatgcaaagaaagttgtaattaataagataatgtcaattttaactggtaaaaatattattttaaattatgatgaaaaatattttaaagagaattcacaatggaaatatttaagaagtattatattagtttgtggatgttatgctgcaaatgtacttgaaaatgttacaacaaatatgtcatttaatgatagagatttagcatttgtacgtgttgatgaattattaagagattttagtgatttcccatttgatattaaagaatcaagtacaggattaggtaagaacttaggtacagaaattgatagtgaaattgataataatagtaagaataaggatagaggtggagaatcacaattacaattacaattagaagttattggagcagttattagtattttcagtaatatggattcaattatataaataatatattatatattatatattatatatatatacagtctctttagatgaatgagactaactagtaatattcagtaaccaaatgtatgttggtttagtccgctgtaactttatttatagccaccggcgatgattctttagttcccagtaaacttcccccgcgcttaataaaaatactggggattcaaaatttttacgggtagttgaaaatgaagttacaacggacttaactaagatacattcgatttttacatattactagttagtctcatttgattaaaaagactgtatatagtttatttataagtaatatatactttctaataaccaacacttattaaataatctgccattttttcgataacatttgcggcattaccagctgatacaccagcaggataatgagcaattataattgctaatttagttttaacacacataacaccttcttgttcatgtttaccataaattgaacgatcatctgccttaatacaaaattgtttaatattttcaacatggaaacctgacatttgaacacttgaagcatttgtaaaaccacctacaattaattgaaattcttgaggtgaaacattaagtgaaccagtatttgcccaaactgcaccatcagttgaataaattgcagctttatcaaaacaaccagagttgacaatgttatcagtataagcgttccaagacatgattagttatacagtatgagatctataccaaaagaaagtacaataaacctatactcatgtaataatctgtatcaacttcattgggatgatttgattccctgaggcgagaaattaggtgattaaattacgtaatacttatactattaatacttatactatttatagagatcagcaccagctcttttgagttgagatagagtattggtattggtactgtcatcaatgtctctgataggttcaatggattgaacaagggtaggattagctctaattggtttaacagttcttttagttctattggataaaacagtagctaatgaacgatgtgccattgatttagttgaaacaggtctaatatcaacagcttttgttatattaataccattagtaataataatatcttgttcattatctttaataccaataatactttcacattttttatcataaagatctaaaatttcattacctaattttaaacttaatgaaccattatcccattcgattattgatgcattactttgtttataaactttaccatcaatagttttagcatatctccatctaattgtatttgctaattttaaagctttaaaacgttttgttttagtaacactttcatcatcactaccattattttcattttcttcatcatcatcgatactatttggattaaatgggactgcatcaactgataaaaatctcggcacattaaatattaatgctttattactcttacttgagacaggatgtcgagatattgatactttagttgtagtaatttgttcttcctcttgctgttcttcactgtcattatcatcatcatcttcttcaatatcattattatcaatattattatctatattattattattattattatcattatcaacgtcaacacccatatcatcatcatcatcatcatcatcaccgaataatccaccatcatcatcatcaatgtcatcaacatcaggaatatcattattaccatttccattaccattattattattatcaatactatcaaccttatcaacagcctcactgttatctaccaccggggtagtctcactctccaccatagtctctaccttatcactgtcactcattatcctctaaagaactactatactctctatacaaccacctccaaacttaaacagagactcaaaataataaaaaacccaccgacgcaccgacgcgctttttttttccacgattttttttaacttctttccttacttaatatattgagtatctgagtggggagttagtattggtattaagacactcttttatgcaaggaacaatgcttgcacgtaccgttagaccctctatagtgtttagatccactagattctactcctctaatcacggtcacaactctggtgatcatcattcttctagtgaacatcatgatgaacatcacgatcatcatgatcatggtccaccattatctgaaagtgaatcaattcttaattctaaaactgctatagctgcaggtattgtattctcaattgcatcatattcttatcttaataatcaatataaagaatctcataatggtgattctattacttcaattgtttcatcaaaacataattttgatcaattaaaggaaaattataattcttatagaaatagagtttcattacaaaaggaaattcaagaaatgatgatgttcccaagtacagaaaagagaaattataataatttaattacttctattgataccgttcctggtagattattcccaactggttcaaattctcaatttaatacaattcaagattattcaaaattagataacagaaaagttaaatcttctccttttatctaaatctattatgatcattacaacttatttatttattctttaactagtatctcttatatacgtctataatattatataacatacttgataactcttattattattcctatattaaatctaaatattatactactactcgctatataatttttactatgacatgaatttttcagtttttaaaacaccataatgtttatatcaacaaacaatcttatagccacaatgattgcatctaaatcagaactgatatcttggataaactctacttttgacttaaactacactaaagttgatcaatgtggtaatggtgtagtttattgtctcattttcaattctttatacccaaatattatcaatcctgcaaaaataaatacaaatcctaaaactgatttccaaattttaaataattttaaattattacaatttggttttaataaagttaatattaatagaaatattaatgttgataaattaattaaatgtagattacaagataatttggaatttttacaatggttctctcgtttatgggatgaaaagaataattcaagaccaatttcaaaatcaagtaatgtttcatcttcaagaccttcaccaagaacttcacttagaccttctcctagaccttcaataattactcatcataatcctcatccaatttcaagacaatcttcaactatgaaaacctcaattatcaaaagaatctcctaaaccatcaccaaaactatcaacaaatataacaccaataaccaaaacaacaacaacaaaacacacaccaattgataaatcaaatgaaatatcaacattattaaataaaattgaaaatttagaaaaatttaaagatggtttagaaattgaaagaaatttttattttgataaattaagagatattgaaatactttgtcaaaatttattacaatcgaaaaattcaattaatttatcaacaaatgatttaattaatgatatattggaaataatgtatgctacagaggatggatttttaccacctgaaagtgatgatattgaacaagatcaagaaattaatcaggaatatgatcatgatcatgatcatgatactaatcaagatactgaaataacaactacattatcaaattccccaaattcaattacttctccaatacccattaataattcatttaataattcaattaataatgatttcttagatgatgaaactttttaaattgttactatagccacgatatataattaacctattatagctcattaattcctaaccaaaattaaattctcattattatcagtcctattgatattagaataaatacctttcatatcaatacctgaaatctttttaattactcgagatttcttgaaaatacaattaaaacgaaaattgtcattactatctgttaaatattttaaattctcaggtacttccttcaatccttttataataatttcgtctagtggagatacattatcgatcaaatgaacaagcctcaaactaaatgcatttgtaaaatcaaaatgagaaacattggaatctaaaaaaatcagttgcttcaaatatttcatactttttaatgatcccagactaacatagtcaacataaataacatgatatatacaaattgtctctaaatacttgaaaatatttaatagacatcaacaagatatgacatccagtaagtgaactacgcataaaagtaatactttttatttttttaacataataatcagtttgaagatatcttcaagaaaaaagctatttgattggatacatcctcatctaaaaccacagtcaaatcaattttaaaatcatggactttaattctatgagttttgagaaagtcgtcaaatatttcaaactttaatatcatttcatcaacacattctttcttcattaatttcaagggtatacattaagccaaaatcaaatttgtattgtttaagtgatttctctttttctaacatagcttctaaacattcgacagccttttcaactttcatattcatctttattttgatattttttgacattacacaaccgtcaagaggttttaatggattaatgacaccctacagttgatttttttggatcaaagaaatattcaacgatttcagtagaatctatggatgtcttcacccataaagtaacacctttcactatatttacataaaaactcaaatagtgagagtttacttgatatgaaaaatttaatactaatccatccatcaattatcaacttttcaaactttttaatcattttatcatcacaaagtttaagtatatctaatgaagttccattttcattaaatgttaaaaaatctttattaaatgtatctactgcaaaaagttactagattaaatagttgaaccctaaaattcatcattaattatcattgttaaaatcaattcacttatagtgaagtttttacgacatactttggatattaatctttcagatagatgatgtaggtaatttttgtaaattgcattgtttatttcatttaaaagaagcaatgtgatcataaaatccaaagattttgctaaggcccgcacagttaaaaaagaatcagcgataagaaaatatcaggtttttccccacaaaattattttcttcaaagcagcatgttatatattgatatcattgttgcagataaaccaggtaatgtttgtagattctttcaaatacgtaaattataaagagatacatgaaaaaattttttgaaaaaaaaaactgatcttcatcagtatatcgaagtaacagttacaccacttccatacacactaataacaactaattcttctattttattaaagtatttatccggccaaaaacataatcacccaatattgaattaaacaattaatatatagctgaattaattaaatcaatagcttccaaccaaattatcagtaatccaacttcttcaaaattatcaaactcaagtttattggttttgatcatatcttcaaacatttggtactcaatcatcatcatttaaatttttggtttttttgcctccatgaaattctttactataaatcaaaccttaaactacacccaccaaaaaaatcttgtgttcgagttcaatttggaaacaatagtaaactgtttatagcatattcttcagctcttgataatatggatgatagcattataaattatataacaagcaaagataatgttaaggtgcaattatgtaaagtcatacaagcttattgatatatgcaaatatttattaacaacaattaatgcctaactaaccttaaatttttgtcattcctgatattgatattagaataaattcccgtcatatcgatacccatcaaattcatattatatacccttctattaaggttatgatcaacatgtatcaaatatcttaagcttttaggtacttctgttaacccttcaacactagccaaactctcatatgaaccatgatcccgcaatgaatgattgattaaatgaatacgacttaaattaactgcatttgtaaatcaaactcagcaaatttagctttttttctataactttgacgaatttcaatttctagtatttttaaacttgtaggtactttaaacaaaatgtgggaaatcgaatgatgatatgcttgaagtattttgatgctttcaatacaatcaggtaaacatttattcaaccatgaatgatcaacatcggcatatgaaaaagtaacccgctttaaatatttcatactttttaaggatcctagaataccacaatgaaaataatttagactttgaatatcaagtatctccaagtattcaaactctctaataaaatcagattcaaaatagtattgacccactgtatcattatacaaaataaccttctttatttttttaaaaaaataaacgcttgaaaatagcttctttaagatatcaactttaatagcaccagtgaaaataattgttagttcaacttcaaaattattaactttgattttatgggttttgagaaaattttggaatttttcgtactttattaacatattgtcaacacacttcggatttgctatattaatcttatgtattgacttaaaatcaaattcatattttttaagtggttttcctctttttaccaaagtttctaaatattctaaagccggttcaacctccatactcatctttacattaacagttattgatataggataattaaaagagtattgcaattttgtagagcattgatcaatacctactattttaggattacaaacatattcaacggtttcactatatttaaataaaactccaaattttttagtatcacttgatataaataatttaatagtaatccacccatcaattatcaatttttccaacttttcaatcattgtatcatcatcaaataaaagtgaatctaataaagtttcatttttattaaatgataaagaatcactaccaattaaatcaacttgtaaattaaatagttgaaccctaaaattatcattatttatcattgttaaaattaattcactgaaagtaaaatttttacgacatactttggatattaaactttcaattaaatcagtaggtaagtttgtcaattgcattggttattttaaggaaaaaaagcaatgtgatcatataatccaaaagattttgctgagcctgcacacttaaaaaaggttagcgataacaatatagagataagaaaatatcaggttttccccacaaaattaattaatagcaacttactcaataattcaattgacaactatttctgagatcaatgaaacttttatctatttaaatactcacaaataactattttagccaatcaaatcctaattaaagttaaatcattgtcatagttattaatatttgaataaattccatccatttcaatacccgaaaaagtcagattccgttggtatatcctttcatcaaagttatagtcattatatattaaatattttaaattcttaggtacttccttcaaaccttgaatcttgattacatttggagcagcattggaaaaataatcttcatatatcggaatagttaaatgaatatgacttaaattaactgcattcgtgaaatcaaatctatcaaattgaaattcctttctatctttgatcatttcaatttctaatattttcaaactcaaaggtacattaaatatagagttgaaatattgatgatcatcagtttgaaatatctttattctttcaatacaatcaggtaagcattgattcatccataaataatcagcattggcatatttgaaataaatctcctttaaatattccatactttttaatgatcctagaaccttataatcaatattaattaaacattcaatatcaagtatttctaaatatttgaactttttaatacaatcaaatttaaaataacatcttttgccggaagattcatatactttatttttttagcataatcatctattgaaattatttttttcaaacaatcaaatgaatcatatacggaaccatttaaatataaatgtaaaacaattttaaaactagtaactgtaatttcatagattttgagaaaatcttgaaactctttgtacttgattatcatatcatcaacagaattttcatcagctaaattaagcccatgtactacattaagatcaaattgatattggttaaatgaccttctcattattatcatatttactaagtattttaaagcatcttcaacccacatattcatctttactataactttctttgatttaacacaataatctgaacattgcaaatcattcaaacatacattcatacgtaataagtttagatcaacaacatactcaaagatttcagcagaatgatagatgcttccattataacagtaacaccttttactatacttaagtaaaaacttaaatcgagaaatgtttgttgatattaatgacttaatactaatccatccatcagttatcaacctctcaaactcatttatcatttgatcattactaaaattaagtatatctagtgaagtttcatcattattaaatgataaagaatctggttcagtactattagttgcatcaatttctaaattgaataattgaatccgaaaattatcattatttatcattgttaaaaccagttcacttatagtgaagtttttacgacatacctggggtattaatctttcagataaatcagtagggagttttgcaaattgcattggttatctcaaggtaaagaagcaaaaaagctatcctaaaatccaaaagattttgctgagccctcataattaaaaaagaatcagcagtaacaaaatatcaggctttttccccacaaaatttgaagatagaaccaggtaatgtccgaagttcaattataaagagatatgcagtaatcacaattagtttctaactaagcatagatcattgtcatatttatttatattagagtaaattccattcatatcaatacctgcaatccttataggttctctaaactcccttatcagatttctataatcatcatagaatattaaatatcttaaacttttaggtacttccttcaatccttctattctaataaaaaatttatgcgggttaaaaacataatcatcaaataaaaaattacttaaatgtatatgacttaaactcactgcattagtgaaatcaaacctatcaaattggtacccctttccattatcatcaatttcaatttctaacattttcaaacttgaaggtaccttaaatactgattttgatttttgatactcatcattttgaaatattttgatcctttcaatatttttaggtaaatattcactcatccatgaataatcaacattagcatatgcgaaattaatttctttcaaatatttcatattctttaatgatcctacactactatgattcatatcaataacacatttaatatcaagtgtctctaaatattcaaaatctttaatacaatcaaatttgaaattacatttctcatctgaatgactaaataaactaagcttttttatatttttaatatctttatctaaaattttccttggtaaaacattcaatgtattatattcaccaccaattaaaaccattcgtatttcaatctcaaaattgtcaacattaaatttatgggtttcaagataattttgaaacgctctataatcaatttccattttatcaacacaatgatcatcagctagttcaagcgtttgtatcatttcaaaatcaaaaaagaacttttggtatgaatcatacacattcatcataactttatgtaaaaactccacagcctttttcaacattcatacctttaacctgtactttaactttctttgatacctcaaaaacatcaaaaaattgtagtgcatgtaaacatgtattcacacgtgatgattcagtattaaaaacatattcttttacctctttaccaaggtgaaaattttcatcacaaatacaataatgcctctcactatacttaattaaaaaatcaaatgctgaaggttctttaaagataactaatctgattctaatccatccatcaatcaccaactctttaaatttcttaatcatgttatcatcactaaatttaagtatatctaatgaaattacatcttcatcaaatgataaataatccttatcaattaccttaatttctaaattaaataattcaacccgaaaattatcattatttatcatattaaggactagttcactaatagtaaagtttttatgacatactttggtatatattctatcagacaaatgatcaggtagtttagttaattgcattggttgctgaaagaaaaggagtgaagaattggaatagatctaagaccaacatggtgaatgtttattaatgccaatgagacaaggaaaaaccaatttttcaagtattttgacgagccgcgtcaccgccacatcaaccactactaacgttaaggtgatgagataaatcaaaggaaatggtatcaaattaaagattaaatgatgttaaacagcaagaataattattcttaaacgagactccatatatatagtactaaaattgttatttaattaaacataatttgtatacacattcacctagagagcagttaaagataaatacttatttttttaagccaactattagagtaaataccgcttacatctaacacctgtaatctttaattgctctaaaggataaaattgtttcttcatatttttaccttcaactaacaaatatttgacagattccggaagtttctccattccttcaattatgagttcatctttcttagaagtcgtaggatgtctacacaaaggaagtaaaaatatcttttctaaaccgcttgcattatcaaagattatcctgtcaaaattgaatttatttttatcactgacatgaagttcaaatactttcaaatttgggggaactttatattttgaaataacaggaaaacttgtttcaatcaaagtcaccgtttcaacacttgatggtaaataattactcatccactcataatcaagtttagcagatgtaaaagaaattttcttcaaatttttcatttctcttaaatcacctaaagttttataactaacataaatcaatgaattaagcattagttcttccaaatacttgaactttttaatggcggttatatcaacttcagaaggatttggaaaatcatctaaaatgattaaatgttgaataagtttaatatttaaaattgaacctgcataatcaagaaaagaatttagcttacgtgcacttgtcatccctagattaaattgtaaaactatatttgaaacatttaaatttgctttaggacgattctctttatatttcatgattatatcataattttttttgaaactatcaaaactctttatactgtcgtgatcggtatcaactgcaaaacccaaaaagaggtttagtttaaagttaacaaattttagataaatttctttaaattcgtcgaaaattcttggaagagtaataccatcatcatcaacttcaaaatttatagttaaattaactgtaattttctttgatttattaagttttctggagaaagcacaaatttggtttggaagtaattcatctaattcaaaaatatactcagtgatttcatttagattatttgtatcaaatctattaaactgaatattttctttactgtatttaaataaaaatgtgaactctgaatcacaacatattttaacagacttaattgtaacccaaccatcacttagtaatttctcaaatttagcatacattggtttatcaaacgtaagattatcgaaagatgtatagtcatcagtatcaaattgaatacaatttttatcagagatgataatttctaaatcttcaactacaattctaaattcatcagagtttatcatgttgaaaatgatctcactagttgtaaaattctccttacatactttggtcaaaagtctaggatctgctgctgtgattgagtccattgttgcactatattgatgattatcagtgaatgagccgtcttgaacgaaaaatgggtaatttggtcgtcaattgtatattgaattgtatattgagcgggttaattaattttttgcaacggtttcagcattatcgatacattttgtatgccttagttgtttctaataaatatttaccttgaattactaacataaaccagttaatccaatatttagtttgattttaagtactattgatatattaaaagaggagactttaaatgaagattgttaaagaaaggcctaatcatgtctttctgtattgattttcagctgagcctccatattatacactgagatgattaagttgttaattaacagagctatacatgtatataactaaagaacatttaggcataaatacttattgtccgagccaacattagaataaataccacttacatcaacacctgttatctttaatttttctaatggtagaaactgttgctccaaatttttaccttcaactaacacatatttgacggattctggtagtgtctccattccttcaataattatttcacccgccttagagccactaagttttttgtaaaatggaagtaaaatgattctttctaaaccattggcattctcgaaatctattttatcaaaatcaaatctatttgtaccattagcatgaagttcaatttttttaaaattaggtggaatttttaattttgaaacactaggaaactttggttgaatccaagttaaggtttccaaactagatggtaaatattcactcatccatccataatcaagtttagtagatgtaaacaccaatgatttcaattttttcagatctctcaaatcacctaaagtcttataattaacatggatacgagagttaaacaatgctgtttccaaatccttaaattttttaatagaggttaaatcaacttcaaaagcattccgcatttcatctaaaataatcatattcttaatgagtttagtgttcaaaactgaacttgtataatcaagataagaacttaccttacttgagcttgacattcctatattaaatcttaagagtatattccttatttctatatttgctttaggatgattctctttatatttcataattatatcataattttttttgaaaccatcaatacttttaaaactgcagtactcaacatcaattgaaaatcctaaaaagaaattgaatttaaaattagtggatttttgataaatttctttaaactggtctataacatttggcacaccactagcatcctcaccagggtgcatatccaatgttaactcgagtgtaattttctttgatttatcaatttttttagcaaacgcaagaacttgatttggaaggaactcattcaaaattatcttgtattcagttattttatccagattgcttaaatctaatccattacattgtatattctccttactgtattttaataaaaatgtgaattccgatttacattttattttaactgatttaattgtaacccaaccttcccctaataatctttcaaatttagcatacattggtttatcaaatgtaatattatcgaatgacgttgcaagatcggtgtcaaattgaatacgatttttaccagagatgataatttccaagttttcaagttttactctgaaattatcagagtgtatcatattgaaaatgatttcactaatcgtaaaattctccctacatactttactcaatagcacaggattatctgttgtgattgactccattgttgcactatatggacgattatcagtgaatgagccgtctttatacctaccatgaaggatatatgaatcgtcatagatcaatcgcatcaaattttttcatgttaaaaaacaccagtttaatatatagggtttatcattggcacattttatatacccaaagtatctacaatcaattaaacaaatataaatatatccagaaagttctttaaaattactttattacttttcaaccacacataaatgcttatcctttactccaatattagtataaactccattgaggtcaactcctttaactttcaccttgtctaatggacatagcacataagtagcagttttgccatcaaccaaaacatatctcactgattctggaagttttttcattcctgtaatatcaatctctttgcttttggtacgactctcaactgtagaaataggacataaaataaatttagttaaattatctgcattactgaaatcaaatctttcaaaatcgaataatacttttccgtttttctgatatttgatgcatttgatacttggtggaacataaaatatgctatagtcaccacccggccattcatcaaattgagtgaatccaattgtttcaacatttggcggtaaatatctgctcaaccattcaaaatgaacattaggatacataaaatgaatttcctttaaatttttcatatctctcaaatcaccaaaatttctataatcaacatcaataaaactacctataaaaagagttttagcataagcaagtttcttgatagaatttacatcaatttcactatttttacatgatcctgtaaacattatgtatgaaataagtttgatatcggaagtcccacaaatatgatcaataattttttccaaattataaggatgtttctttcctaaacaaaagttgatataaatctcaccgatttcacagctcatacctggatgtgtattagcatatttcttaagtaaatcaatatttgtatttaatctatcaatacagcttgtaaagtctgtattaatactaaaaacaatatcaattataaagtgaaagcttttgaattttgtgaaaacatctttaaactcttggaaatactttaaaatttcaagaacattagaatctctactttgtggtattttcatgctgatggtgactttacttgattgattcttaacttgtttcaaaaattttgcaaccataaatggtacagtattctcaaattcaaaatcaaattcatttatcttatcagcaaaactcgaatttaatacattggattgaatattgtaatcacaccattttaataatatagttgacaattttgaaataacacacacttttaatgatttgatagtaatccacccatcacgtaataatgtttcaaatttacgatgcattgactcgttaagtgtaagattatcaaatgatgtccattcatcactatcaaattgaagacgattggcttctggaacaattatatttaaatcttccaacttgaccctgaaagtatctgaatttatcattgttaaaatgatttcactgattgtgaaattctttctacatacttcactcaaaatagcaggatcctttgttgtgattgactccatttttgtagtatatgctggtgcttatgggagtgtcactaatagaaatgcctgtagcaaagagtcagattaatcgcatcgaatttttttcaagttggaaaattatcaccaacttaatatgcatgcagggtttgtaatcaatactttttatatacccaaagtttcatagccaatctatatacaatcagttttataaatatatctaggattttatcacattttacttttcaaccacacataaatgcttatctttcactccaatgttagtatacactccactaagatcaattcctctaattctcaccttgtctaaaggacacaacaaattagtaggattgctactatcaacaacaacatatctcaccgattctggtagttttttcattcctgtaatagtaatttcatgtattttggtaaaactattgatttcagaattaggagataaacagatttttgttaaattatctgcattcctaaaatcgaatctttcaaactcaaacaatgcttctccatcattttgatatttaatacatttaatgtttggtggaacataaaatacactatagtcaccataaagccaatcatcaaattgggtgaatttaattgtttccatacttggtggtaaatatttactcaaccattcaaaatgaaccttaggatgtgaaaaatgcatttcctttaaacttgtcatatctctcaaatcaccaagattctcaaattcaatattaatataagaactaaaaaaaatgcttttaacgtaggctaacttctttatagaagttaaatcaatttcacccttattacatactcctgtaaacattaaagaggtaataagtttgatattaaacgttgagcatatatgatcaataatagcgttcatattataaggatgcttctttcctaaacaaaatttgatatacacctcaccgatttcacagctcatacctggatgtgtattagcatatttcttaagtaaatcaatatttgtatttaatctatcaatacagcttgtaaagtctgtattaatactaaaaacaatatcaattataaagtgaaagcttttgaattttgtgaaaacatctttgaacaattcaaaatatttcaaaatatctagaacatcagaatctctattttgtggtaatattattttgatagtgactttacaatgtttattattaacttgcctaagaaattctgcaagcataaatggtaaaaaatactcagaatcaaaaaagtattcagttatcatatcagaatagcacgaatttaaaacattggattgaatattgttatcacaccacattaaaaatcttgatgacaattttgatacagcacaaactttgtatgttttaagggtgatccacccatcacgtattaatatttcaagtttctgatgcattgactcatctactttaaaattatcaaatgataccccatcataactatcaaattgaagacgatcaacatctgaaacaattacatctaaatcttccaacttgactctgaaagtatctgagtttatcatggttaatataatttcactgattgtaaaattctccctacatactttactcaatagcacaggatcccttgttttgattgactccatctcaatgtccttatttgtcaaagataattagacaccctactgaattccagacacgtataaaatgaaaattttgaatttgataatcaatcgtgattttttttcaccagggctaaattcactgccttgaatactgtttccattgtatacgattctgataattagtatactaaacgtaaagtatttcgttaacctgtacatgtcatatattacacacatctctactatatattcatatttattatcaaggtataaggtatataaaatatgtcgaaaaccgacatattattattgtaatgactgtagctggttgagcctccacatgtatagcagctattatttttactaaacaacttctctatctctctctctatctatgctcaactgcatctaaaaacttatccattgtaccaatatttgtgtatattccagtaatactaactccaaaaatttgtagttctttcggtggtcttataaagtttttttctgattcatcttccactgtcaaaactctaacacattcagggaattttcgaactccaccgacatcaatataatccatactaccactataagagaattctgcatcattaacatataaatgtatattagttaaatcttttgctttttcaaaattgaatctcttaaagtcaaaaaaatttgtattggaaactccaagtctcaatatttttaaatttggaggaatagtaaattttgtattattagagggttcatcaaattgagtaatattaattttctcaacagttggaggtaaataatcattcaaccatgtataatcaatacctggactcataagttgtaatatttttaaatgtttcatatctctccaatctcctaaatttttataattaatttttaaattggtaccaacaataaaatcttcaatatatttaatttttctaacagcattgaaatcaacatcaacacgaccagctaaacttcctattgctaaatgttttatatatgtttaatatcaaaaattgaacataattgatcaacttggtaattaattcttgatggaccaagatatcctaaatgtaaacctaagattaaatcagagtcatcaaatgatacatcaggattatcatttttatatttaatcctagcatcataaaattttttcaacaacaaaacgtcaaattcgttatcagtaaatattgtaaatgtccatttcaattcaaaattgaaactatcgaatttcttaaagaatggtttaaattcattaaaatagtttataatttcactaggtttcgattcgaaatataggtattcaactgtcctgatattaactttacttgatttattcgcttttttcagaaaatctttaatctcagaaggtttgaaagcatttgcatcaaaatcaaaaatatttactttatcagtatttttcaattgtaaattattacattgaatatttttaagacaataatcgtataagaatgtaaactttgtacctccataaactttaacttgtttaatagtaatccaacattcacttaataatttttcgaagttttcgtacattggatcaaaaaatttaagaacatcataacgagtgtaatgatcctctctaaacaaaagttttttatcacttaaaactgtaatttctaaatcttccaatttgactctaaaagtatctgaattaagcattgttaatatgatttcactaatcgtaaaattctccctacatactttactcaatagcacaggatcctttgttgtgattgactccatctgattttccttattccttgaagataactaccatgtattgaaatacagacacgtatagattgaaaactttgatgtcgagtttcaaaattgtgattttttttcaccagtgtagattcactgccttgactaccgtttttgctgcatgattctgataattagtgaatttatcataaagtagtttgattatcagtatatatcatatattagaacatgtttaacatgtagctagatttattggtacaaaaaaatatacatcaaaagctaaaatgttgttgatatcaattatacatgcactacgaaagtgtttttcactgataaatggttgagcccccttcattagttacatgcattttctctatgttagattccatttatatgtcaattttcaactgcatgtaagtatttattagctttaccaaaatttgtgtatattccacttaagtcaactcctgaaacttccaatcccttctgtggtttcataaggttcaatccagttccatcctcaactgtcaaaactttaacacaatcagggaatttcctaactccttgaatcttgatactatttatcttgccaattttattaccaccaagcccaaattctgattcaacatagagaaatatattagttagatctcttgcattttcaaacttgaatctgctaaaatcaaaaatagtcttgtcttgaacttcgagtttcattaatttcaaatttggaggaataataaattttgaattattagaagttgattcatcatgttgagtgatattaattatttcaacagttgaaggtatataatcactcaaccatttataatcaacacctggagatagaaaatttaatgattttaaatatttcatatttctccaatcacctaaagtacgataattaagttctaaaggtgcccctagaacaaaaatttctaaatatttgaatttcttcaaacaactgtaatcaatatcgaaaacaaaagccatacttgctaaaatcacatgtgttataagcttaatatctaaaagtgagcataacctatcaatttgataatcaagtctacatgggaaacggcatcctatttgaatatttaacattatttcaaaatcatcaaatgatatactaggatttttatctttatatctcatcaaagcatcatattgagattttaattttgcaacatcattatcattatcagtcattatggtaaatgcccattttatttcaaaattgaaaccattgaattttgtaaagaaaactttaaattcatcaaaataattcaacatatgattaattgaagattgtgcatcagagaatgtcatcattctaatattaattctacttgatttgttgacttttttcaaaaattttttaatttcagaaggtttttcaagatcagaatcaaattcaaattcatttattttatcagtatttctagtttctaaattatcacattgaatgtttttaagacaataatcaaataagaatgaaaaatttgaatcaccattaattctaatatgtttaatagtaatccaacattcacttaacaacttttcaaatttttcatacattgagccatagaaattaagaatatcataaggagtgtaagtatcatttctaaataagagttttttatcacttataattctaatttctagattttcaagtttaactctaaatgtatctgaatgaatcatattaaagattatttcactaactgtaaaattttctttacatactctggccagtgtttcaggatcttgtgatttaatcaactccatatcaatgtagttattccttgtagaaaaaacaaattcatgagtggacccagtcatgtaaattgatttgatgtcggactatcaactttgatttttttcaccactttgaaatacactgccttgactaacgttttttatgcatgattttaataattgtaaagtaatttgactacctgtatacatcatatatatatattatagcaacagttttagcatatagcttaaattattagtaaaaccaaaagtatagaaaatttacattaaaagctaagattctgatattatcaattactaatgaaaatagtaactggttgagccccctcaatgagacatgttctctattaggctccatattttatttttcaatagcatgtaaaaatttgttctttacaccaacatttgtatatattccactcatatcaactccaacaaatttcagttgtccaagtggctttagaatctttccttcagattcatcttcaactgtcaaaactctgatacatccaggtaattttttaattccatgaatacttatatcattcttgctaccaacatatgaaagttcagcgtcaacgtatagatatatgttcgttaaatctcttgcattttcaaaattaaatctactaaaatcaaaactacttttgtcatgaacttcaagtttcaatactttcaaagttggaggaataataaattttgtataattagaggttgattcattaagttgaataatactaattttttcaacagtaggaggcaaacaatcactcaaccatctataatcaatatcagaagaaagaaaatttactgttttcaagtatttcatatctttccaatcacccaaggtacgataattgatatctaatttggcatcaataacaaagatttctaaatatctaagtttttttatactactgaaatcaacattatgaataatagcccttcttgataatacaaaatgttttataagtttgatatcaaaaactgaacataatttatcaagtctgataatcaagtctgcatgggaaacgacttcctaattgaacatttaagattaattcaaaattatcaaatgatacactccgattcttatctttatatctcatcaatgcatcatatattgattttaattttaatacatcaccatcattatcagtcaatattgaaaaagcccaattcagttcaaaattgaaaccatcgaattttttaaaaaaagctttatattcatcaaaataatttaagaaataagtactcgtagatttaccatcggagaatgccatcactctaatattaattctacttgagttattaacttttgttaaaaattttttaattacagaaggtttgtggacttcagaattaaatttaaattcattaatcttattagtattttttagttgtaaatcatcagattggatatttctgggacaataatcgtataggaatgaaaaattaggattaaatttttgctctggatctacatcaattctgacttctttaacagtaatccaacaatcacttaataatttttcaaatttttcatacattgaaccagagaaattaagaatatcataaggaagtgtaagtatcatccctaaataaaagtgctctatcacttacaactctaatttctaaatcttcaaatttaactctaaatgtgtctgaatgaatcatattaaagattatttcacttattgtgaaattttctttacacgctcttgccaatgtttctggatcttttagtttaatcaactccatacgtatatatactgttttactcctcagaagagctctttgccaaagtattataatgaaggctcagacattcatctcatctcatctacctcaagtggaaagttccagtgacgcgaaatggtttaagagagttgagacagacttggaaggtttgattatatcagtgttatgcattgtgttatgagtaaattatattaggatcgatatggtatatcactgatatattctactataagtaaccaaaaagtagcatcaattaatgaaatattgatttgtaaaatttcctgataagtagaaattgtttatcataagtaatttagcaatacaattgagtaccctttatttcaacttccaatcattcaactattcactcatccacgatacacattactaaccatcattaacattaaccattatcatcaacaaaagaaagaaagaagtagcagataataagcaaaatgtaccctatagagcataaagactaattatctgcaaaagacgcgactttcccttattctagaatgaaaatttatgttattaatcttctattactactatcagtggcaaattgttaatgtagtatatagtaggatatttatcttctttttagttaccaatatcaaccatgttctctcgattactatctagaggaacggtgtctttaagacctatagtgttgaatcagtcaataacaagatttaacactttaaataatgttcagaaacaattattaataaataataaatcctctattagattattctcaaatagtaatgttaaattatttcaatttacaaattcattaagagaaaaggaagatagggaaaattcaaaaaaacaaaataaagataaaaaggaaggaggtgataagaaaaaatctgataataataatgaccaagaaaatggtaatgatttctttaataataaatcaccattcaaagattggcttgtttattctttaggttttacatttttattctcatttttaagtgcattaggatcaactgaagtttcaagtaataatttaactttccaagaatttttaactaattatcttgaaaaaggtttagtttataaaattgaagttataaataattcatttgttaaggcagaattaattcattcacaaaatccaagatttgttacttttacaattggttcattatctttctttgaatctgaagttgataatgttcaagaaaaattaggtattcctttaagtgaacgtatacctgttacctatgaaaagagaacaagtattttatcatattttataccatttttaccaactttaattttaattggtggtacattttacattttaaatactattaagaagaaaagaggtggtgcaggtggtagtggaggtccatttgatcaaattatgaatgttggtaaatcaaaggctaaattatttaatcaagaaactgatattaaagtacaatttaaagatgttgctggttgtgatgaagcaaaggaagaaattatggaatttgttagctttttaaagaatcctcaaaaatatgagagattaggtgctaaaattccaagaggtgcaattttatcaggtcctccaggtaccggtaaaactttattagctaaagcaactgcaggtgaagcaggtgttccatttttatcagtttcaggttctgaattcgttgaaatgtttgtcggtgttggtgcttcaagagtacgtgatttatttaaaactgctcgaaaaatggcaccatgtatcattttcgttgatgaaattgatgcaattggaggttcaagagagaaaaattcaatgagatcaaatgatgaaaaagaggcaacattaaatcaattattagttgaaatggatggttttgaatcctctgatcatattgttgttttagcaggtactaatcgtgcagatatgttagataaagcattaatgagaccaggtagatttgatagacatattaatttagataaacctgatttagaaggtagaaaggcaatttataaagttcatttaggaccaattaaattagagaataaaattactgatgaatttgcaggtaaattagctgctttaacgccaggatttagtggtgcagatattgcaaattgttgtaatgaagctgcattaattgcggctagaaatgatgcagaatttgttacaattaaacattttgaagctgcgattgaaagagttattgttggtttagaacaaaaatcaagagttttatcaccagaggaaaagaaaacagttgcatatcatgaagcaggacatgcaatttgcggatggtatttaaaatttgctgatccattattaaaagtttcaattataccaagaggtcaagcagctttaggttatgcacaatatttaccagatgatcaatatttaacaagtgaagaacaatttaatcatcgtatgattatggcattaggtggtagagtttcagaggaattaaattttgatgatattacaacaggtgcagcagatgatttacaaaaagttactagaatggcaaatgcaatggttttaaaattaggtatgtctaaaaaacttggtacaattgtatttgaaccaaaggatactaatatgcaagttcataaaccatatagtgaggaaacatgggaattaattgattctgaagttcaccgtataattaatgatgcacatgaaaaatgtagagatttattaagtgaaaagattgatgaagttaagaaagttgcagaggaattactattaaaggaagttattacaagagaagatatgattcgtttactgggtcctcgtccatttgaggaaaagaacgaagcctttaagaaatatcttgatcctgaggatagtaaatagatataagttaatactatcatcacttattattgttatcttaagtatttaattcatgtaaatagaagttattataattataatttaaactaatttaacggacgaaattaatgttttatcacagaggttgagaaattttaatttttctcactttaattagtacagttaattaatattgattaattgatttgttctgtgtactttatctttgatttgttttcttatagtaagtatcgttgttggataaagaagagtgagtgaccatataatgtttgtgtatcaaggaaatcgaatacccttacctaaggatccaatctctgcaccattacagagacaaattgaagaaactcatataattagttgtcaaaatgagcatccatgtttaatttgtgagaaatgtttaataaaatatattgtaagagatgaagtaattaagaatggtaaagaagttgaaattgttttacctgaatctaatatggaaattgttaataatttcaatacatttttagataattttaatttaagtgatgaaattatattttgtagtgaaaattcagttaattcattattagagacaagtttggattatgttttgaaaggatcatcaaatataggtaagaaagaggtagagaaaaatacagaggtacacaaaaggaaaaagatgaagttataaagaaacctgttgaagaaaaagccacaaatcaaacaatcaaacaaatcaagcaaataaaagtgatacccctattgataaagcaatacctaataaagaaagagaagaaaatccacctgatatatcagaaacttctgaaccagtaaatcaaaaggaaatgaaaactccaacaaaatcaaacaaaggtaaacaaaatgttaaatcacctattaatactacaaataaagtaacaaaaccagcaagctaaacctaccaaagcaaaggaaattgaaaacattgcttgttatggtaaaataggaacagttagttggggttgtcgaaggacatttcaaggcaatgaaagatttgaagaaaacattgggaagatccaaatggatctgcatgtttaagagagtttattcactctgcgtcattctacgaagaatgcttagtccaaatctgtgtttaatagataaagttatgctatgtatattgtattctctgagagtcgaactctaaagtgtaatgatataatataatagcaagaggtgtgtaagaaccgcccagtgaagccccagtgcgagtcagtggggagataaacgtttcactccgcccactccgcccagtggaaaaaatttgtagattttttttgccgatgctttccgttttgtttacttttcagaagttaattgttattattatcattatgaataaacattcactcttctttatccaacaacaactactacagatcactccaattcttgctatccaatgcacccggtcactcacttcaagaatttggaagttgataaggaaaatataaaacccataccccagggaagatcagctgcaaagttgaatgaactgatacatactgatcaaaacacattagagaaaaaattgaatgaagaacaattacaatttgaagaaagtttaactcctgaaatcttgcaggaacttagatgatccagttagaatcttatttaacttatttaaaatggattagagaaaattatagaacgggtaataacgattcactttatattcaagtattagagagaacaacgcatgattttaaagatgataactattataagaatgaagtaagatatttcaatgtttggttggattatatatctttcagtgaccatccaggtgatgtgttttcatatttatttaaaaaaaatataggttctgagttatccctcttctttgaaaactattcactctattttgaattaaatgatcaatgggatatggcagaatccatttataaagatggtattactaaaagggctagaccttttaaaagattacttaaatcatataatgaatttcagtctaggaaagcgaagaaggcagcacatttgcatgattcagttagtataagtgagtctaaaggtttacttaaccctgatggattaggactgtcctcatcatcatctgtcattccagcttcaactgagaaatcaactattttacctaaaaaagccaaataaaatgcaaatcttcaactgataatgccaatgaaattaatgattccacacatgagaatgaaagcatcaaaaaacaaaatatcagtttatttgctaatctagacacaattaaaaactcaaagaaagaaaatgtcataaatccatcatcttgggagggtcaaaaattaaaatcagctacagcaaaaccatcaacagataaaaagtctaaaattgaaattttcaatgataagaaaaacgaatacccagttacaactccagttgttctatcaaatggaacagtcaaagaagtttatgattttaatttagaattattcattccctcaaattcaacaggtgtagcaagaagttggttagatgttctattaatgttcaataaacccattgaaaacaatcaattcacagataatacagtaacaacaacaaataccaacaaacgtctgccatcttctttattcaacactcctgttactaaaaaagctaaaacagactctattgaagattctaatgaaaataatcaaaacgatgcaccatcaccttgtgataaatctccaggaattgatgaaactccaatattagattactttaagaattcaaaagatggtctgttttctggaatgaatgattttgttggatccaaggaaaaaacacctgataataaaaatcttcaaaatcaattagaaaacgaacaagtttttaagaatgacgctgaatctatcggtgataatgagaaaaatctgttagatgcaattattggtgataagtttaatgatattttcacagacacaattactagaactaaatcattaaatcttaaacttgatatgaatagtgaaaataataccaaacaaaacgaaaacactgaaaatgctacagatgcattactgagctcaccatttgttgataatccaatactgaaagaagaagttaacgacgaactgaatataataaacccatttgatcatgtaaataaaatgaaaataatcagtacaatagaacatggtttatttaacgatttaagatttcatgattttgctaatattgaaaattccaaattaagtattttgaaaagtatttttaaacctaattcaaaccctatttatggaaataggcaagcaatgatagaatttgagaaagataatatttattgtgttactaaagaattaggacaaggcgagtttagtacagtttatcttagtgaaaagatgaatggtcagttgaatgctatcaaaattgaatccccttctaatatttgggaagcttatattttgtctaaaattaataaagtttcgaatgatttcattaaattacaaggattttatagatacagcgaagaagtcatttttaatcttaccatatttcagacaaggaactatattagatctggtaaattgttcttcggatgaacaatttttaacaggtaaaaattttattgatgaaacaattataatttacttaactattcaattgattaactaatattatcaaactacattcattaaacattattcattgtaatgtgaaaccagaaaattgcatgttgaatatacaatcttcatgtaataataacaaagtttcattcaaagatatcacattaatagatttcaacaaatcaattgatatttcattatacaattctcaaactcaatttcaatgtaagaaggaaaaaacaaacccagaagattgttatgaaattgtcaataatttgccatggaaatatgaacctgattatcatggtattgctaatgtaattcacctgttactgtttaacagtcccctaaaaacaaaaaaacttgaaaatggaaagattgaattagttgaaccaattaaaagatattggcaaactgaatcatggaaggaattatttagcatcttattgaatcctaaaaaatatagtacaacaggattggtaagtaatgaattgaagcaaatcaagggtaagtttgaatcatggtttagtttaaccgttgataaacgtctgtttttaagtaaattaaggtatatcagtgaagttttagataccagaatcagaaaaaagagtaaataaatcattaaataacattgcttttgcagtttttgtaacaaattaagagtttttgtaatatttttttaaaccatttatataaatgctatataccaaaagaacaagaaagtaaaattaagataaattaaaaaagttagataagaaaaagtaaatcaaaaaagaatatgttattaaagtgaatggcatatggatatgcacttacattgttatgtatgatttagacagatggcataagacctgttttttcccagcttctgattctccttgtcaaagcataaatatttgaactttctttgctcttaaaatgttaagctcattgttatcgttggaaatataagattccatttcttcttcatgtaaactagcattaacactagtagcatcagtttgattagataaaacttttctgaaacctaatcttgatgaaaaagaagatgaaacaatttcatttgaattttttttaggagatgatgaaccttcttcagaggaatctgaaataacagactcttccaaagttgaagcagaagcaactgattttctttggaaaatacgttttcaagtttgcagataaacgtcttctaaatgaactacgtggtggtctggtacttgttgttggttcagacaaaggttctagtgattcatcttcttttggaactcttgaaggggtttcttgctctttattttcttctaatctggtatcgattgaaacaaaatgttcagcacaaggaagttctccaattgcactaattatatctggatcaatatactcttctctagactggtgcttatcatcaaaaggattggaatcaatgtttggactttctaatttaccagtgaatggattaaaaagttgtaaatcatcacgtaactcatcaatatctgttgcatgaagagattcgttctcagattcactaatatcattatcatcttcttctgtttcaacactatatcttgcaggatttcttagaattgcatgtttgaaggtaagatttgaagttgctgtaaatgataaaccatcataattttttggagagtgtgatgtatgagcttcacctggatgatgcaacagttgcatttcttgatctagtatcttcatgaatttcgtcacttctttgatcactcgaaacgccatcggatgaagaatactcagttgaatagtcatcacttgaagacttcttcgtaataatttctgtaccaagatgttaaaaaaggaaaaaccatatttacgaacacagttatttcaaagagtaaatcaaaaagagtaaatcaaaaagattcaagataaaataaatatgaaaaataataaacattataaactttaaagaaagacctctatttaaatagatttacacaacatagtacagaacttgattcaaatatcttgcaaatcagtattgcactaaaatataatattctgtttctccatctccggtatcaatttgctacccatttcaaagtctgctctgcgatgttcatgtgttctgtaataagcacacaatttttttattttcccaaaattcgcggatttttctcttgatcttttcaagtggtctctcactattatgcttctcagcttcctcttcagtaacagttttctttaccagtaagttgaagatagaaccaaatgtgacagacataattgtcaatgtaagaataatgacgttgtaaggcattgagaaatcaggagttggaagaaccaaaagacttgtagtagtacgcatgaatatattctactttactaatatcatcaatcaatgcaaatatagttggttgaagttcaaatccatgatttgcatcaggtggatattctgcatataataacattcgccttatcaaaattggtagtgaattttaatttcgtatgtgctggaacttcaactgaaagttcaaaatgagttggtgcaactctatcaattgctggattgtagacgatttctttgacataatcagacaattcagcgtcattaacattaatgttctttattgtatttccattttcatctgtaacaactacagttaatgtatgcatgtataatcttacaaaccaaggtaatgtttcaaaaatgacgattttttgtggttcatctcctgggttatataaatcatatctaaaacctccattgtcttgtgaataaccggataatgatcttgaagcgtaaaatggcggtgcttcaactgaattaatcaatgatgcatcctttgtattaaaagcaatattatattgcgcagttgatgtaagatagaaaacacagctttgaatcttcataaaaatcagaaactggtgccaaagttctcatttcaacagaccaattatccaaatcaatatcaagacatacttttgttggttcagatcctaatagagaaccaccttcaatttgtttaccaaataaatcaataaagctgaaatctaattcttttgacggtggtaatgggaaacaattgaaagcatcaaagagtcttgtttcatcacatcttaatttggcacctggtgtgggttttggaataggcatttcatttctgtctagaatctttggaatgtttaatatcatgttaatggattgtttcatgctttgttgacaatggtttgcatcaccttcactacaatctgtgacaacatcaatggccattgaagaccattctgcattgaaaattttgttaccggaaagtaaagttgaaataccttgtcttgccttggttggtaataattttaaaaatggagtcaaattttcggtacaaataggttctcttggtaatgcacttctaaatctgtaaatgtttccttctaatgcaacttgttcttctaattctacgtcatttgcaaaaagtttttctggagtggtggtgatcgatttatcaataaaattaaatgatgaacaaaacataccggataatgagtttgctaataaaacccagttttcaaatgcttcttcttttgaatttgcttctatacttgcccataattcaacaccagttccacctgtagtaaaaccattatcaaccaattttccatttaattcagaatcataccaaccatgtgcaaatcttacatgaagttctctagcatttgatgattttaagatggaaccaacagatttagggaacacatcataatacagaatatcatttgtttctggatataactttacagttgaattaacatcaaagttaaaggaaaacaacacattatttcctttcaagggttttatgttaaggtattcagagtttgggtagtgtttttcattctcattgaaaaatcgtacctctcttgcttcagtgacatcgggttgtgcttgataatcattatcatcaccactagcacccgcattagcatctgtattgacctctatcagaatggattcttcgtgaccttcatctttgtcagcaatttcaatatttacatcttcgacattcaattgattttcagaatcaatatctgtcggtatcttatcattttcattcaaattaagagaagacttttcagcactgactatagcagccaatacaagccctaggatgcccaatttcatctgattgtgtattgggtcagtaaaagttaattgtaatctgcagtaaacaaaaaacacgtaaaccgttaaaaatgtgagcgctcaataaaagtacaattccttccttgagtgaacgtcttttctttaattgttaaataatatacatagattttgtgttaggaaagttcataaagtaagaaaagtagttatataaaacggtgcttagaaatatcaacctgattattcagatagttttaagttttttgatgttaagtttcatcagttttattctcaaaaagcaccaactaatacatctttgaataaccgaaattaccgcaaacaaaacaaaatatagagtaacattgacttttaaatcatattcttctaaaacttgttgaccattagtaaaagggcattcaccattaggtaaaaattcatcaggattacatttgaattgtaatgatggagcgaaaaccttgtttgaaattaaaaacacacaataatgtaaaggtgagagataattgataccttttaaaaagttatcaagagtcatagctaaaagacctgccatagccacaccaatggaacagaaaacagagataacattcaacgcaaaaccgggatgatcaaatacagtattaaatgaaattccctaacgattcacctgtattaacaacaagaaacgtaccgtaaaacatggtgaaaaataaacctgcattgatttggaaaccaacaacaaaaaccataaatattgtgaatataaaacaagatataacttcaaatggaatttcaattaataaataactgaagaaaaaagaattcaatccgataacatcatcattgtattcatagtagaaatagtctctttcttgtggataagatgaaatattgttcaacataccagtaaaatataatgcagtaaattgttgaagtaaacccaacctatcttgtataccggacatattacttttcaatctagcaaagaataaagataaaataatagccataccagtaacttgagttgaacgtgcaattagaatatttttatctctgactaaaccaatccattgtcttattgtaagagtagtgaacccaatataaaatgcatgccctctctttgatgatagacttaaatatatctctaacttctgatttgttttgtagtgttataacattatttagaatagaaactctatcaattgatctccacgactgtataataccatcaactctttcccttgtttccaattcaatctcttcatttgatgtgttatatgaaattaaatcaataacaaaatcagcaacattagttaatttaggaataggatagtttagacttgtaaaatgttttatcatttcattttcagttccattaaatgcaacatgtccacctttggctaataataaaattgttccaaaatcatctaatgatctaggttgatgaattgtcataataacagtggtacccattttagttaaattacttaaacattctataatagaagcagcagtgaaagaatctaaccccgatgttggttcatctaagaataaaatttttggagatgaaattaattgaatagcaattgaaagtctacgtttttccccacctgaaatacctttaattaaatcattaccaaccatagtatttgcacaatctctcaatcccatcttcaaaataatatcatcaacaatatagttttgttcctcactacttaaattggactttgataatctcaattttgcggcaaatgtcagagtttctcttactgtaatagatgataaaagatgatcatcttcttggacaacatatgaacaaataggcctaacaagggtatattcaggtgatatgataattattcatgtaaatatcaccctgatgaagtgtatttggtaaggaaattagatgacaatctaccactaattaaattcaaaagtgacgtcttacctgaaccagaaggacccattaatcacatttaatttgcatttttcaaaaacagcattcacatcgtttaaaatctttttgtttgactttttaagtttattttcaacacttaaatcaatgtttttaattgacatggtgatttttgacctattttcgatatcctttaattcagaattactgaaaactcgattttcatccttctaggtttttctttattataaatctcatcaactttttgtgaataatcaatggaattatcaatagtagtaactagatgaaaccttccttacccatagtaatatctaaaggttttatataaaacacaacacccgcagccggcataatgtaccaatagcaaatgctaaaacgacacaaataggtaactgcattccagttttcaggaaaacccaaattgttcaaaatataattacctgagaattgataacataactcatcaacatttgggttatcagcaaatttttgagaacatcctctatcattatctgaaaattgattacttgcataagtaaccaaacgaataccataaatatgcaatatatttacaccaacgaacataaacaggtaactgtttagcattagcaaacaaaccatttgtcattgattgaaatgtaaaatttaagttactaactaatgtagcaattgcaacatccctactaactgaggctgcaaatgttgcaaatgtcatagtatttaaatggaaaattaaacaaccagcaaaatatttccagaaaaactttagctgagtcaagcctcaaaccgtacataaaataagtggttattgaaaacaaaactggaatccaaagatcttctgtaataaatttagaaattctcctagctataagaaatcctggtactgaaacactattctccattctttctctatcaaaaacttttaaatccgacgtacataacctataagtttcatataacagaaacaaataacattgcaaagatgctgaggtatataatgaagattgcatagatcttacaccagcaactgaaagatccggtttgaaaaacaaccaaccacacattaaacccaaaaacaaagcttcaaataaaatagaaaaccacccaattggatctctacactgcaatttcaagttccttctaattcaaaatgttcacttctcttataaatggtgcacgtacctgtatcaatgaacacatcacgttctttaacattctctttaatttcctaaagtcatagcatcaatatcggaagttcattcattttttccttccatacatctgtgattttttcaatcctttcagtggactcaatttccttggcccttgttcctattatctatacttgttatatcaacataaaaatctgcagggttcactttagtttctggtattatgtaacccaaggagttaaaatgggggaaatatggatttatatgaggagccataacatagtcttcccttggatagaatcaaaactgtgtcaaacaatttgaaaaatatcagatctaggttgatgaatgctcataataatagttttgttcaaccttttggctagatgttgaaatgatttacataacaaatatgaattataattatccaatcctgttgttggttcatctaagaataagatagatggattagaaattaattgtaaaccaacacttaatcttctcttttcaccaccacttaaacctttatgttttttatcaccaacaagtgtatctttacattcctttaaacccaatgttagaataatttcattaaccaaattttctctctcctcccttgatgtaagttttggtaacttaagttcagcagaatacaataaagtttcaaaacaagttaaagttggagttaaaatatcctgttgaataacatatgcatttctatactggatttatatcactatcagttattatactttaactataccattctgaaccattgatttcttattaatttttctattggctaaacaatttcaacaaagtagttttacctgaaccactcccaccaacaatacaagttaatgaatttgacggtatatcaaaagacattgggtataaaattgtttttattgaatcatttgattctatatcaggaattcttaggcatttcggtctaccaaaagaaaacattttctttctttgaattcttgaaccaatggataaatttcgtacagtgatttgaactttacgtgttggtgtgaatgaaatgttttcatcagtatatcgtaaataatggtctaatcgatcaccagtgtgatcttcaccggacgaagttgaagtattgtatttttgaacctcatgcaagtggagactatcccccttgcccatatctaccataacttataccttatattagttcaataaagaatatccttacaatatattggcacaggagaaagagtttcaaattgatgtattcaacgtttaaaataatttcatcccagccgcattgtggggattgatcgatagtatcagcttcttatacaatttaatcttggccaagttttaatatacacattctataatttaaaccacactataaagataatatacactatatactctggttagtataaatatattaaccaaacccaatgctcattaagtaattatcttggatttggtttgatatttcttatgcagttgtgctattgtgtcatcgatttctttttcaggtgttgaactttccaatggtttgttttcatcgattccaagaggtgttgatactggttctaacactggtgtcactactggagtttcaggttttgcttcttcaactttagtaggaggaaatataattttttcagctctttcaagttttaacttggttatcattactgttccttttaatttgataatttcatcttctttttcagatatagttctttggaatgaattgttcgatttacgtagatcagttatcttattttcatttctttcattctctcttttaagtttctcaatttctatttgtaatttccgtaattccattgatttatcatcgttattcttagatacactttttattcgttctttaaacatcttattctcttcttgtctctttttaacttcctcaagtaaatcacaataactactataaactttcccattggtacttttcaatctattatattctttttgtaaattttcattcattattaacagttctgaatatcgttttttaaaacttaattgctcaaacttttcgactaattgtaatagatattcattattattctctagacgtatacaataagataataattcattattctctgcatcaccaatattaaaatcatctaaattgatatttttactactatctaatcttctaatttgttcaaattcttcatttttcattctttcatttcttacagatttataccatttatcagtctcttcacgcatgattcgtaatgtattatcaacagtatcatcaataggaacatattggtcatcatcaatacatcttcttatcctttcatgaattttcctcaactcatcgtctgaaaggtaaacatcaccattatctgggatatttggcatactactcagatcttcgtacatcccccttaaattggcagaatccttcttacggcctgatcgtatccatgtcgttataccttcaaacatcgtgctgagtagagagaaaagataaagctaaaagaaatgcacacatttaaaagagaaggcgtagagggaaataaaattatatgcactgggcatgcccaggtaaagtacaaagtgttgatatatttggtttaaaacttttattttgtatacgtttaccttaaagtttatgaatattaatttaataaaagcaattaaatataatgtttatttatttataattaaaagagaaagagaatgtgatatattgtgtaacttaataaatcagtatttccaaccatatgtactacctaatctattatttaaatgttcacgagcagtttgtgaaacaccatgtttttccatataatgagatgcacctctacctttgatatctttaataattttacttggaacaggttcaagtaaagtttcatcaccaggatgtgcaaataaaacaattgaatatctatctttacccttatctaataattctcttggaaatctaactctatgaattgttgattttaaatgaccattagtccaataacataattgatctgcaatattaacaattaatggagctgcctcattttgtgcagcatatttagcagatgctggaacgtatggtacactttcccattttttagtaattggtgaatataattgtaaacctgattcttccttcttttgaaataataatgtaacagtaccataatcagtatgagcacctgcaacatttaattccttaaatttatccttttcctcttcacttgcattttcattaacaggtgatggataacgtaaaaatctaaatgttgtaccagagaaatgatcatcatgatgtctttcaacaaaccattcatgatcaattccatcaacaccttcaatttctaaaccagctgataataatcttaaagattttttcaatgcttcacgtaatttaagtactgttttactaattatatccattttatcttgccaaaattcaggtattggttgatttggtatacctgtttttaaatcaaaatttgcaaaattaaaaccttcctttggatcaccataacctctatctaaatcatcttcttctaaattttcaactcccatacctgtataacctgcattatcagtttgaattacacatttatttttttcctctagtggtaatttaaaataatcatgactaaattggaaaagtaaatcaatttcagcttcagtgaaaccatgtccttcaaacattaaaaaaccttgagttgatgatgcatgaacaattttctttgcatttgcatctgaattatcatttaaatcaataatttcaagtttagaaatctccattttttcttgctttttagttgtactcatgattagaaaattaaattatttttgatgaaatagacccttgttcttatataatgaggaactttacaaattagaaaaccttaatagtaaacagctaataatattatcccaaaacaacttaaaaggaaaagaaagcttatatagtaaatcggaccacaaaaaaaacggataagaatttctttttattaagtggacgttttaaatcaatttgttcaattaataaactttaaattaattacggtgacttctattgataagcaattaattcaattccttcggaataaccgaaaactacaattattctgaatagtcataaacaataaaaagttgtcaattgtaacaggagtaacaagagtaacaactatgattacgaaaagataataaataataataaagtcaatattttgattataaaagattaattatagaatgataaatagttagtcaattaaaaacattagacttatttctttgcagctttagcagcagatttggtaaccttacctgctttgtcaaccttttcaacggatttaataacaccgacagcaacagtttgtctcatatctctgacagcgaatctacctaatggtgggtattcagtgaaagcttcaacacacattggcttggattgggaccatcttgacgatagcagcatcaccagatttaacagattttggatgatcttcaacggatttaccagttcttctgtcaatcttttcaactaattcatcgaatttacatgcaatgtgggcagtgtgacaatctaaaactggtgagtaaccagcagaaatttgacctgggtggtttaagacaataacttgagcattgaatgaagcacaaccttgaggtgggtcgttcttggagtcaccacagacattacctctcttaatatccttaacagagacgttcttgacattgaaaccaacgttatcacctgggacaccttcatctaattgttcatggtgcatttcaacggatttaacttcagtggtaacaccagatggagcgaaaacaacaaccatacctggcttaatgacaccggtttcaactctaccgactggcacagtaccaataccaccaatcttataaacatcttgtaatggtaatcttaatggtttttcagttggtctgacaggtggttcaatagcatcaattgcttctaataaggtcttacccttaacgacaccggaagccttggtttccttagtccaacccttgtaccatggacagttagtagatgcttcaatcatgttatcaccattccaacctgaaattggaacgaatggaacagtctttgggttgtaaccaaccttcttgatgaaattttgggtttccttaataatttcttcaaatctcttttcatcccatttaacggaatccatcttgttaacagcaacaattaattgcttaacacctaaagtgaaagctaataaagcgtgttctctagtttgaccatccttggaaataccagcttcgaattcaccgacaccaccagcaataattaaaatagcacaatcagcttgggaagtaccagtaatcatattcttaatgaaatctctgtgacctggagcatcaataacggtaacgtgatactttggagtttcgaatttccataaagcaatatcaatagtaatacctctttctctttcagcctttaatttatctaagacccaagcgtatttgaaagaacccttacctaattcagcagcttccttctcaaacttttcgatagttctcttatcaataccaccacacttgtaaattaaatgaccggtggtagtagatttaccagaatcgacgtgaccaataacgacgacgttaacgtgttgcttctctttacccattttgatgtaataaaagttttgcttgtctaaaaaagaggaagaagaaataaaagagtaaaaaggaaaaaggagaaaaagtggaaaagaacaagtaatttaaagtaaaaaataagcaagggggggatagtcttaaataaaaaggcagcagaaagtgacaatagtgagtggcaatattttcaatttctcactgtgaaaagtgaaaattttttcaaccttcgagaacctcccagatagaaaattacaatagtggggcgagggtcactaactgagccttcaaatgaccgcccactggggggataaaattacccgttcattaatttgcccttgaaaaaatttaaaattaatttaaaatttttttttaatttgcgtgactgtcattttacattactgtgtcgctaagggctcatcacttctatttctgatcatcgccttttttgacacttttgccctcgagggtttgttagttgaatttattgtatcagttctgctttattataaagaagggaataatttaactgtattatcgtatcgtttatttctctattaagtcaatgctgccatgtgttcgtcgtaaagtagcctctttgaagatggtatcttcttctataagagaaccacctttgaaacctttaccaggtcgtagttctttaaaactaaagaataaaaaccctcctttacctcctcgtaataatgtagagaaaagagtagcttttgatgataaaaaaacaattaataataaagttaacaataacattgatactgatacaagtactgataatgataatgatgatataccaattactaaccagtatgaattatttgatgctcctcaggcatacccaagatcaccaaattcttcaatttcatcaattgattctccattagattcaaattcaatatcaattttcaatattggctcaacacctttaatacatccaacacctataacggatagtgcaattgtgcgtgatattgaatatcataaatcagatattaaacatttacagggtaaaattaaaaaattagaatcaaggaaaaaatctttgaaacataaacatcgtagaaatgtaattaaatcttttttttctatatagatagtctatctttataaataacacataaacatataagacagataacaattgacatttatgtatttaaatagtgcccatgtaccatatttaactctattaatttaataaactgaaggataataaaaaaattacaaaatgcactttcctaattcggtaattttcacccttatcagtatggaatcgaaacatgttttgaaattcatgttattatgaaaattgctgcatcaattgatacttttagtctttagttcccataacaactccctttttttttcttcttttccaattaaaatcaatcccatatacctcttacaaaactataatgtctgctgctgaacagagagacattgttcgtaacccaaatttaattgatgatcatgatatcccttattatggttcaatcaatataaacaatcatccaaatcaagatctattgattcaaaaacgtagagcttcatcaatgtactcatctcaagcaaaaaatttacatttagcttcaacttcaattaaagatggtcaatatcaaccaattgataccgatattaaaactgaaattaaaatgttgttctcttccgcaatacctttaatgattactttcttacttcaattttcattaactatttcatctgtctttttcgttggtaatatcggttcaaatgaattagccgctgtttcattatctaatttattagcaaatatttcatcattcggtttaattgaaggtattgcttcatcattatcaactctttgtcctcaagcttatggtcgtaaagattataaattagtgggtttacattcagttagatgtttcttcatgttaatgatcctttatattccaatttttattttttggaattggggtgcttacccacttttagcaactgttatcactgaagttgaaccttgtatcttagctgctgaatatttaagaattttagtttggagtgttccaggttttattgtttttgaagttctaaaattatatttacaagcgcaaggtatcttccacgcatcaactatcgttttacttgtttgtgctccattgaattttatcataacttatttcctagtctggaatgagacttatggtataggttttaaaggtgcaccattagccgttgttattacaaatacattaatggcattaagtttattattctatgctacttttattaatggttatcaatgttggtgtggttggtcatgggatgttttcagaaattggtcaaaagctcttaaattggcaggtccaggagttattatgattgaagctgaatggttagcttttgaaattatctcatttgcatcttcaagatttggtactgaagcattagcagctcaatcaattattacaactatttgtattacagtttatcaaattccattctcaatatcagttgctggttcaactagaattgcatggtttattggttcagattctaaaagagcagcaatgacttcattaagagccgttattatcgttgctattattttcggtattggtacaggtattttacttgcttcagatcgtgaatatatttgtggtttcttttcaactgatgaaaaagttgttaaattagctgctaaagttttaacaattgctgcagtttatcaaattcctgattgcttagcttgtgtcttaggcggtgttttacgtggtcaaggtagacaatatattggtggatatttaaatttattcagttattacgttcttgcattacctgttgcattttttttcggattttatttagaatttgaattatttggtctatgggttggtttaatggttgctttatgttttgtttcatcttgtgaattatatttcgttattaattgtgattgggataaaattatcaaggattcattagatgaagatttagaggatatggataatttaagacaaatattagaaaatgatggtaataattcatcttcaagatcagttttctcagatgataatgaatctatttcattaagaccttcaagaagtgttgctagtcttattgatcataatattttaagcccttcgattaatactactttagtaattcctgatattccacctcaattacccatttgaaacaattattcataagtttagtacaatctttcatttataaacatttttaacaagcatattaagtcaaaacgtaaatcctacttacatgtaaaacatctacaagatctggaggcggtcttctggatctgtaacagtaatgtgtgctaacttaaatctgcttatgtaataagtttgtagctagtttcatgattttgataaaaacttatcgaattgcttagaccccggatgcatacaagttattaagaggttgtattctggataaacagaaacgaacctaacttgaacactttatagaagagaacatgtcttggtttggatcagctaagtatccaatatttgatgaaaaagttgaaaaggcaacatctgagtcaattccaaatggtgatattgattttgccactgcattagaaattacagatttaatacgttcaaagcaagttccagcaaaggaggcaatgcgtggattaaagaaacgatttatggatgcagagaatattaatatgcaaaaatcttcatttaaattaattgatttttgtataaagaatggtggtgaacattttataactgaaatctcttcaaaagaatttatggatccattaattataatgttaaagaaagattcaattgatcattcattaaaacaatatatgttagaaaatattcaagtctggtcaattatggtaagtacaaatccaaaatttgaatatattaatcaagtttataaaaaattacaagatgatggtgttgaattcccattaattaaagattttatagattccaatttaattgaatcaaaagttgcacctgaatggcaagattctgatgcttgtatgatttgttcaaaattatttacatttttaaataggaaacatcattgtagatcatgtggtggtgttttctgtaatgcacattcatctaaaacaattgaagttcctgaattaggtataactattccagttagagtttgtgataactgttatgatgatcaaaaggcaaagcgtaagaaacacaagaagtctaaaagtaaatccaaaagtgtggatattaacatcaatgatgaggatgaagatttgaaaaaggcaattgaattatcattaaatgcaactgctaataaaaatgaatatataccaaaatctaatgatagaaatgcaatggtaactcaaataaatgaagatgatgaggatgaaatgatgagtgcagcaattaaggctagtttagctgagttacatgaatctccaagttttgaaaaaaaaattaaagaggaaccaccaaaggaaacaacaaccggattatattcaaatttattacttgacaagtctgaggaatcttactccaagtcaacaactgaagtacaagcatatcataataacacacaaccgccagcacaaataccgccaagttatcaccaacaaatagaacaacaagtaccaatacctacttatcaagaaaaaccagcattaaaaggtggcgatgaaagaagtgttgttgaattcgttcaattgctagataaaatcaagtcagggtcaagtgtgaacaatgcttcattactcaaactaaaatcagatttaattttattacatccaaaaattacggaagaaatcaattatcaaaactcacaaattgatcactatcaaactttattttctaaattatctgtgataagtcgattatacgatgatattttacaaacaagattcaaccaagagcaagaaatgctcaaaatacaagctactcaaagttatgcaccaagtcatgcaccaagtcatgtaccaagttatgcaccaagttacgcaccaactccagtgcaaaaccaatacttatcacctcaagagacatttggatatcaaaaccctcaagtatttgctctccaacaaactggtgctaatatacagcaacaacctaattttactatgaatcaacaaccgtcatacacacagtcgtcacaaaatttaccaccacaatacttacaacctcaatactcctcaactccacaatatgcacagttaccgtataatcctcaagtaccacaactaaatcaatatacaggtaatgcaccacccgcaaatattacacagttaaaagaaacaactgttcctactgacaaatctgttcaacaacaagtaactgcaccgataacacaaagagatgctgctccaatttttgcatcgctgaaaaacttgagttacgctaaagtgacacagaatactacaaatggtttagtgaaacataatactgaatcgccaaaagaatctgcagctgaaccaacacaagattcatctactccaatcaccgaaaaactgccggaacctgttaaagaacctgttccagctaccccagttgcaccagttaaagaaccagttaaaccaaaagaacctgaaattgtcaatttaattgacctttgagttaatattattctttcctttcataagcttatacctgtataacatttacatgtaacactaattgacaattgaacttagaatttgtaacaccttaaatttttaaaactgaaggctcatcaattctcgctgatctgcgaaatgtaagaaaaaaattgttcaccgacattaacggaaggcaaaaaataaagttaatggctccccttaaaagcattcaattttaaccatatcattgaacttaaaacaaccaatatggaacaaaatagtgatccatatacattgctaaaaaagtttttgctaaacttggcacataattacaattacaaatttgataattctgcaaaaacatgtttaaaggatacaattacatatttttttaacattcctgaacatgacttgaaaattgatcatactattcattatcataagggaagaacatgtggtcatcgttttgttagaggtgaaacatgctggagatgcttaacatgtggctatgatgatacatgtgccttatgtcagttttgttataatgaagaagatcatttaggtcatgatgttcatagctcaacaattcaacgtgattttgctggatgttgtgattgtggtgatgaggaagcttataaaggtttgcaatgtcctctatacactcaacctcatgaaattcctattcaaacagaaataaatcaagaagttttagatcatgtttcacgtattttaggtatccttttagattttgttattgattttacaaaccactcattatcttgtttgtcaccttctgatagagctgagaaaataaagttacgccatcaaatgtgtgctctaagtcaatcagtttaccaaggaatcgataatgatacaaataaatatggtttagttttatattccgatcaagttcatcaatttagagatgctgttcaaagaattagaattgttacaggtaaagtcaaagaatatgctgaaatgattgcaactagatgtaatacacatggtagagctgttgtgatgatttctgaaaatttgaatgatttgttaagaaaacaaactttgttaactacaactggtttaactgcctgtattaagaacgtccgtgaaatatttcgtgaagaaatgtgtgatgaaattatcagctggatcaatgactttacacaatccaatattgtgaaatcgaatgttgagctattagcggtgatacctaaaacattcttaagtgcttataatccaggatgtatgaatcaatggatggatattttttatgataaagtactgataaatcctatgcaattgcgagatcgcccaataagtccaacagatttccctgctattaacttcaatgagaacaataatgttattccgaagtttgattcaactcctgtttgggatctacctgaaagtttgaaaaatgattgccaatatcacgaattgtcaaaagaaaagttcaaaacttacaaaggttcaaggttacaatttttattaatatttgatatcagattttgtaagacaactagaatcaatttacattcaatttacattccatcacttgctaaaaattgtatttatagtagaatgttggttgctcaatttcttgatatttatgatacaatattgacttcatttttaatggttgatagggagcctgaattatctgttatgcctctactttctacacaattgttcagttcaccatcaaactcatctttaattttaaaacacggtgatgcaatcaagatgataacaacaatccacagttatatactaactggtaaaactctgaatatactacatccgagtgaaaaggaaaatctgccccactacaacattacattctctacattgaaaaatagaaaatgggctcatgtattattggacctttcctatataataaccagaaatccagatattaataacattttcaggttttttgtttgttttccaaaatatgtcaactttttggctgatttccaaggtaaaccaactttccaaagagaagcagagaagcacgttgagtacgaaaatcaagaatatacagtatactttaatgccatgtcagtcatatcacatttttcagaaaatgttggtaaaatcttaaataaaattccaaagcaaagattgttgtcgcagggaaatccacttgatatctggtataattcatcttctaatacaatgataaaaccattcactgaatcagtatatgttatgattattcgtagcatcattaattcctcatttgtcaaagtcaaaacttaccctccacttccagttccaaaaccaataaatgacgaaaaacaagatgtcattcagttcaagccatgtaaagaatttcctgatttcaatgtggtaaaatttaatgttgccaaagatcctgcatcatttttacacccgttacatgttatgctttcttggatgattgaaatggatcaatctatggattcagaaaaggcaattttaaacttaatggatattattcaaggagaatatgagttttatttgaaagatcaaaataatgtgtataaacatcctaaatatgaaggagtaatggcagttttcgatatcccacttagaaaaattgttttagtttcacaaataaaatctggtttatgggtacgaaatggtgtttctgttaaaaatcaaatgacactgtatagatatggaagcggtagagagtttggattcatgagagatttatttttatgtcaaatatacgttggttactttaggtatgctcaattggtttcgcatacaatttttgatagatggatgctgctcccttggttaaatgatgacatgaaacaatctgcataccatccacaacacataaatggtcttttagaagaatttatgttgtttctgattaatttagttactgaggatttacatttacataaattgagtgcagacgatgttacatttttaatgattcaacatgagattatacatgcaatttgctttgaaaagaagacctacaatgaaattgttttactcattccagatcatatttgttctttaaagaaatttccaattgcattcaaatattgtgttgaacctgttaaagaatatacagatatttctgaagaaaagtattatagattaaaaccacagttttatgacaccattgatccattttatatccatttgaactcaaatagaagagaaaattgtattcttcaaatgaaaaagcacattagtaaacgtgataaagtactggaatctgaagttgtcattatgcccaaaaaaattgattggtccaagagtccatttgcaagagttacagatattttacttgatgaaaaggtattgttatgtatatttaaatcactgcaacactgcaaaaacaaatttctgaatgctgaagacattagtagtaaacaatcagtgaaggaaaacaatgaatcgttattgggtctggtattacatttaacacatattactattgatcataaaaatattatggatgttaaaccggttgaattgtctagaatattagtcgaaatttcaaagatttatgagtcaaacaaagttgatgaacattcagccaaaatgaaatttgtgatgaaaaagatttacaatattctttcaaagatggagtttgatatcgaacagaatttagtagacttcaatccaaatatattagatgagaactataattttaccgatagtgatattaaatccatttcagatttatcaattgatagaaagaaaaagcttgccaagaagaagagaaataaacttttagctaaattgaagaaacaacaacaaaaatttgctgaagtaaatatgatggatgatttaacggatactgcaactattgatagtggaagtgatatttcaagatctgttgattttggatctgagtctgtttctagagctgaaagttcctatgatagaccattaacagatggtgattttaatatgtcttattttggaaatccaaacgaaagatccattgttgaaaacgatgaggaaagactattgtctttatttgaaaaaaatctaactaatgcatccgattcatttgttcaaggaaataaattaaatggttgtatcccaaatggtgggtttattccaaatagtgcatccaatgagaatatattagatgatgacgaagaaaaatgtccatcatggaaatttcccgaacatacatgtcttttatgtcatatgccagccgctaatgagaatgaagtatttggtattttcagttatatcacagaaactaatgttttcagatatgttccgccatatgatgattatcatttttacaacgcatttggtggtaatgttaatttagatgaagttaagcagaccaatgaaagtttggaacaatatacaagtgaagttgagaaagaacatgttattggcccagggttacctgataattatatcgatcctaaaagtataggatttactgaaaatgctggtgtttttacaagttgttcccatggtatgcatcttcaatgttataaacaacattttgaagcatcacttaataaacaatacacacaaattactagaactacacctgagaatatcaagagaagagaattcagttgtccattatgtaaaagtattaacaatgttttcattccggtgttatacaagaagaatagtaagaagttttatgataatttccaaaagaaaattgacattgaactgcttgataacgtcaagttatctgatagaattatgaaagatacaatgatttatcatatcagaacaaacattattgaagaattgaaaagtaattttgaaccaaaagattggtttataaatgaaagaattggtagtgatggattaaagaaatataccctactagctgaatctagaatcccattaatattacaagaatgtttaattgatgttgcacatgttgcaccaccatttgattcatttggatcaagtatttatcgtacaattgaatcattggaaatttcattaagaggagaaggttatgaggatgttccaaatggtaagaaaaagaaactattaatcaatcaattgaataatagatcaattacaagtcttagagtgtggttacaaatttgtgagattatgaaaacatcactgggtattaaaagagatgataatataatgaatgaatctaatgaagtttatccacagagtttaattggtatgtattataatttattagaagataatgagttaatatttagtggacaagattattttagtagtttaatttattgtgatgaagttaaatcgttgggatattcatttcaaagattagttggtgtattttttatcaaacatattaaacaatcattaatgaagattatgataacattaatgaagagaaatggacatattggagatgaagaaagaattgaaattttgaaaacacaggtatattatggagatgatactattatgaggatgataattaataagttcatgaatattgaagtatgaagtcattaaatctgaattaattgatgttatttacagtatgttaattaagatgattacaccatttttaagaaaagtattaatattaagttttgccaaattttccagatttgaagatgataaaattaaaatgaatgaagatgatcgtgaatgtgatagaatttgtgacgttttaaatttaccaagagttgatgaaatattagaacaattagatactaaaatttttgaagatgttagttctgataagagggaggaacttttcaatagtagaatgaaatatccaagtaaggttaaattgattcatttaccaaaggaattaaatcgtttttacactgaatattataataaattaagggaggaagatagatatgatgaaccaggggtatgtttattctgtgctgaaattgttgatatacagaataataggtatggagatgaatatggatcatgtacaatgcatttaaaatacgaatgtattaatggaggtaaaggtatatttttcctaccaagaaacaattgttgtttattattagataatggtaaaggatcatttattgatagtccatatagagatgaatttggagaagttgataaagattgtaagaaaggtcataatgtttggttaagtgataggaaatatgatgaaatggagaagaagatttggttaacacataatattcctaatgttattgcacaaaagcttgaaaattggaacgatatgggtggatggtcgactctatgataagaacaatagtttttaaatttataaattggtctgtaatttactttaacgaagtgtaaatgaaaataacagcgttaactagtgtgtaaattaaccctattgaataatagaataattaaatcaaattaaatcaaattaaattaaataagttaaaacaatagtaaaatgaacaatttctagtaccaagatataatagaaaacgtcattttgtgaaacgcgttgcgaaaggaaagcgcgttttgctttgtttgtgttttaccgctttgggggaggaaacgcggtttgtggactttttttctggaacgatattgatcttgtgtttttcaaagataagaagttgatctgaatgaatataaaagagcacttgtatccacttcaattgtgatatgtcttactgtctatctactattttatttcttttagtatccaaagtcaattccaacttcagtcactctttaaataaataaattaaaaatgcaattctcaaccgtcgtccttttcgcagcatccgctttagcagcatcttccactgtcactgaaactgcactttcaactcaacttgaaaccatcacttcatgtggtccagaagttactgattgtccagcaagagaacacggtaactcaactattaccactgcttcagataatgcagcaaacggtgcttacggtaactattacgctgctggtgcagctgctttagctgcaggtgctttattaatgtaaagttcttagcccagtttagcttttacttacaataaaaaaataaccacggttttaacataattctgctttgatacctctttagaaatagttatatctatagttttataattataatcataatcataatctaatttaatctattatactgtattagtaccttataattacgtaataagcaacgcatttctttaaattgaaattttcttttgaatacgtgccaaatctattggaatcattaatcattgatgattgctgcttatttctctttttgatttgattctactgcacaatcatgtcgtacaatgttgtaagactgaaatatcttataaggagaaatagacgtaccattatactggctacaatcttaggtattgcgttacatttcataattcaatcaacttatttctctcagcctcaatttgaaattgatgattcttatgaaggtacatttagaggtaaatatccttaaaactattaaatcaactgatgaattacaatctcctgaattttataataaatggtcaataataggttatttagatgatttagttaatgaacctattgaacattcaacttttgaaaattcaattgatccattctcaataattgaatcatatgaacttgaaaatacttcatttatttataatcaattatcagttcttgaacgtgcacaattttatgaagattatattttatcattgagtaaatatgaatttaatgatattcaagatattatctataaagatgcattttatagtaaaaaatttattaatacaagattaaagaaatggttaaaaattaaacaacatttaacaactgaagaattagaattattaggtattaatgatgaatggtttaaaaatgttgttaaagatattaaagaattaaaattaaaacataatcaaatatctgcagatgaaattaaaaattcttttacacaattaaaatttttttcaaatatattcttaaatactaaacaacctgaaactcctgaacttgataaaatttgtacttcaacttcagaaaaattgtttccttggttaagtgggttatatccaaaattttatacttatactaatagaatggaaaaaattgatgtaactccattcactcaaaaggattcaacttgttttattaaatcattacaacaaaatctccatggtaaaggtattgtaattacatccaataatgcattaattcctgaactttcaggtttattatcaattttaagattaacaggtaatcaattaccaatttatgttgttcataataatgatttatcacttgaatcaattaaagtattaaataatattgctaatgaaccaataatgaaattaccaaaagattcaatgccattgaaaattccaaataaattaaaacctttaaatattatttatattgatgtttcaaatacaattaataataaatataaaaaatattttggtggatttggtatgaaacttttagcttatttatttaatccaaatgaagaaatgattatgttagatactgatacagttattgttgatgatataaataaatttttcaatgatgaaaaatatctaaataatggtgcttattttttcaaagatcgtgatgttaattcagtttatttatgaagggctgatggattattttaaatcttatttaaattatgataaagaatcacattatcttggtatggaacgtgttcaaagtgaagtagttagaaaatagatttttcggttcatttgcacgtcattttatggaaagtggattatttgttattaataaaaaggaaaaatttgatggtgtaattgcatcaacaatgatgcaaatgtttaaattatttacaggttcattacatggagaaaaagaatttatttggttaggtcaagaaattatgggtaataaatatgaatttaatgaaaaacctgcaattgcaattggtgaattatcaccaaatagagaaggtttaacaagtaaagaattatgtacaacacatcctgcacatatttctaaaattaatgatttattatggtttaattcaggatttttaacatgtaaaaaatttgaatcatattataaagatattaattatgaacgtaataaaggtttagaattaattgatattaaaagaaaatatttatcaccacttcatataactcatggaattttaccaccacctgcagaatataatattgaagttaataatgttgaatcaacaagaggttggagaatgacacaagaatgttcaaattatatgtggtgtgcatatgataaaattggtattgaagaaactagtatgagtggtgaaattattgaatttgatgaatctgatacaattaaatgggattatttaggtaaattatgggttaattattataataaaggatatattaaaaatgatcatggatatattgaaggtgatgcatatgatgaattaggaattgataaaattgatatatttaatggtgataaatcagttgatgatgatgaaaatgatgaaattaaaaatagttatggtaaaagtgattatgatgatgaggaggaggaagaggaggaagaattagatgttggagtttctaacactttaaaagaagaagaagaagaagaaggaaatgaagaagtgaaagaacaaaaagaaggtgaaatggatgccgttaattagccaaattaagaaaatatattatctttttataaattaatttataactttaaacctgatttatctgtttttgttttgtttttattctaacaaactttccaaatttctaatgcaagtatattaaattttgaagaatcacttaatggttcattattaaaagtttcaacagtatctgaagcaccaatttgaagatttgaatcgaaccataatccgaaatttcccatcacctgatccaacacttatgaaatgttgatctgaataaattataaaatcattaattcctgtataattgaaaactttgagtgaattatcattaatatcctttaaattttttttccaaaggaaacaatctccattaccataaaaagttttaccttcttgaatatgtaaataatcattaatataagcaccgaaaatattatgatgagtatcttgtacaataattaaataaccacgacgtctatttttattattttcactatcatgtttacaattactatataaagtttgtaatgaagttccacattgatcaattgaataaactaaatgccaatcatgattaatctgtataagagttggtaaattttcccttattttttcagctaattcaatattaagtaatttatgtgatgttgaatctttatatccacttaaaattatcggagttaatggaggatcttcaaatgaaattggctcaggtgttggtgactttgattgtgatgattgtctttgaaatgctgaacgaattctctgtaatggagatgccattgtgtctatgtttttcggtgtataaagagggggcatcgaattagtgattataattaaatttgtaatgtgttgcaaaaaaatttacacctacgaataattcatgaaaccttcgttttcccttatcttatacatgggcaatgaagttaaatgatataattgaactattaaagacatcacaagagggtagtgggaatgtagttaaagcacagggtatgtcattagaatgggttttatcctctatgatgtattcaagtatttggtgttttatacaattagtaattttttattatatgaacggataaatatcctaatttttatcaaaatggtaaaaagatagaaattaagagtaatgaaagtattaatagtaatagtaataataataataatgtttcaattattaaatacttacaatatgagatacgtaaaaagggagatgtaattgaatggcttgatattgagcaatttaaacactgataatttaaatggatatttattcctaagatttgtctatgttagcttatattttattgttggattatgtgttatatgtattccaatacttgtaggtgtaaattatggaggtggaggagattgtactggtatggatgtaatttcaatgtcaaatattaaagatgataatagttataaatatgttttccattttggagctgcaacgggtgtagttttatggtttcattgtgtttatggacatgaaagtagatttttaaatgaaattaaagaagaagatgatgaatgatgatataattgaatgatagtgatgttatcattcctaaaattattaaaaataagccaattaatagaagtagaagagcaccattaattccaattaaaggtacatcaattagtattattggaatatcacctcgtggatggtcaaatgataataatgataatactaataagaaaattataccaataacaccaccatcaccaccatcacctgcatttacagcaatttacaaggcattttatacagtaatttcaataattatagttattgcatgggttataccatcagcagcatcggcagtacttgcaggagagatatcacaacaaattaaaatatttggaccatttacatcatttgcagaatgggttttccccacaattgcattttcaacaattgcaagtattggtagagaaatgatgattataatggataaaggtgttagaattggggataaaaatcattggatgtttttatttgatacagcacaattaataatggttgtatttggaggatcaaattatgataataatagtaataagaatttaaattttacaaataatttattagaaagagctacattagcaggtaatttctttatggcatattttgttgttagaggattaactgtattaaatggtgcaacattaagaggttttgaacttattaaatatttagttattcatgatgataatactactgataaattagaaaacacatattgttcatcatatgcagcaatatgtgttgcagtatgtgttacattattaacatcaattacagcaccaattgtattattatttgcagcaattcatgcaacacttgtagtttcagcacaaacattttggttaggacatgttaatgtgaagaaatgtaataaaggtggtttacaacaatacagagatgcaattttacatgttaaatatggactatattatatgttaatattcctcatagcagtatttaccagagttgaaccagtactttcattcctaatggcaacagttgccatcgtttcatattgttcatggtaagagtataagccaccataagtgtttataaatagaaaataaaacacgcctcctcgcgaggctggtttcacaataacaatagagagacacgctatttccccttattattattatctctgttttgctttcatctgtgctttgttcgtattctttcagttctgcatctggctatttaataactgaaagaacctgtattttgtatataagtattacaatacttcagtattaaccctttgtctttgctcttagtattatttagtaagaactaatttcaataatcaacacacacaagaaatgcgtctctctggtttagttccaataatatcatatctttctacagttattgcagatagtacttctgcaactgaaattacaacttgtaatccattgaaagcttcaaattgttcacctgatcctgcattagcaactgcaattagtaatgatttccatgaatcttcacctcattatttaccttatagaacaccatctaaaatttcttattctgatgatggtttatcattaacacttgctgaaagatttgataatccttcacttgtatctgattattatataatgtttggtaaagttgaagtttggcttaaatcagcttatggtcaaggtgttatttcatcattttatttacaatctgatgatttagatgaaattgatcttgaatggtttggtggtgatgcatcacaaatgcaatcaaattatttttcaaaaggtgatacaacaacttattcaagaggtggttatcatgatatggcagatccaagatctgattatcataattatacacttgattggacaactgattatgttaaatggtatattgatggtacattagttagaactttatcaaaggatgatcctcaaggtttcccacaatctccaatgagattatattttggtatttgggcaggtggtgatccttcaaatgctgaaggtacaattgaatgggcaggtggtttaactgattattctcaagtaccattttcaatgcatattaataaattaattgttgcagattattcaagtggttcaagttatgtttatggtgataattcaggtacttgggaatcaattaaagcagttgatggggaagttaatggtagagtaagtattgctcaagcagaatttgcttcacttgttaatggtaatgttccaagttcagattcaagtgtttctaaatcttcatcaattccatcaagttcatcatcaactttatcatcatcatcatcatcatcatcatcatcatcatcatcatcatcatcatcatcatcatcatcaagctcctcctcctcttcctcttcctcttcttcttcaattgaatcaacaacttcatataccccatcaaccacaacttcatcaacaattccaagtcaatcatcatttattgatgaggattctgaagaaaccgatgataatgaaatttcaacttcatcaactatttcatcaacttcatcattatcaccagcacatagaagtaaaacagtttctcttaaaagtgaatatttaacatcatctactaaaacttttgaaactagaactacaagtacagaaaagaatgaaagtgagtcaacaaagactgaatcacattcaaaatcatccacttcattaaaaacttcatcagcaattgaagtttcatcaaacattgcaccacaattcaacagagtttctaactcttcattcacagcccttttaatgtttgcattatgtcttttctaaacctgtattcctgtagttaatctttaaatctttagataatctttgtattttacctttaatataatatatccctccatactaaatcccaatgaggcaactcacgcgagacgataactgataaaaaaattttaccactgaaaaaaaattttcattgtgttatactggttttcatagagattttacagtgttatatttaattactacagacaaataaggtatgagtgatattactgaaaagaagagaaaacatgacaatgacagtgtttccaagaaggaaaagaaagtaaagaaggataagaaagagaagaaggataaaaaggataaaaaggaaaagaaagacaagaaagagaagaaagataaaaaagataaaaaggaaaagaaagaaaagaaggaagaatcaaatgaagaatctgttgatatcattgaaactccaattgaagaaatcaatgcattccttaaggaaaatgaaattacaattgaaaatggtgataatcttaatattcaaccaattataaattttaaatcattatcaaattacaatattaattctaaaataagtaaatgtcttaataaatttgataaaccatcaccaattcaagcaagtgcatggccataccttttcaaaggacatgatattgttggtgttgcagagacaggttctggtaaaactttaggttttggtgtaccagcaattaatcatattgttaaatcaaataataaaaaattacaagttttagttgtttcaccaacaagagaattagcaacacaaatttatgataatttaaaggaattaactgattcaacatcattaaattgtgtttgtgtctatggtggtgtccctaaggatcaacaacgtaaagatattgcaaaaagtcaatgtgttattgcaacacctggtagattagttgattttattaatgaaggtagtattaatttaaatgatgttgattatttagttttagatgaagctgatagaatgttagagaaaggttttgaagaagatattaaattaattattaaaagtgttaaaaatgaaagacaaacattaatgtttacagcaacatggccaaaagaagttagagaattagcaaatggatttatgaaaaatccaattaaagttaatgttggtaatagagatgaattaacagcaaataaaagaattacacaatatgttgaagttattgatccatatgataaagaaaagagattaattcaattattaaatcaatatcaaagtaaaaataaggatgataaaattttaatttttgcattatataagaaagaagcaagtagaattgagagatcattaaaatataaaggatttgaagttgcagcattacatggagatttatcacaaattcaacgtcaacaagcattagatagttttaaaaaaggtgaatgtaatttacttttagcaacagatgttgcagcaagaggtttagatataccaaatgttaaagttgtcattaatttaacattcccattaacaattgaagattatgttcatagaattggtagaactggacgtgcaggtaagacaggtattgcacatacattatttacagaacatgaaaaacatttagctggtgctttaggtaatgttttaagaggtgcagatcaacaagttcctgatgaattacttaaatttggttcacatacaaagaagaaagaacatggtgcatatggtgcattctttaagaatgttgatatgtctaaaaaggcaaagaagattacctttgattagtttaagtagtttgtttatattatattatttataaagatatgttaagaagatacagtaacccttttataaaattaagataaagagaagaagtgtcatttattaagtgcacgtgtataataaataatttagaaaataatcatgttgagaacaataggttttttattatctcagtttatattcggttgtcattaataaactcttctttctgccttttggcaagggattcactgtaggtatactcttcaattggtaaaggaaaagagaatagtagtattggtacagtatgaaatttggtgaaactttaaaatcttcacttattaaagattacgcttattattatattaattacgatgaactgaaatatgctgttaagaaaggattaggaaaataataatggtcgttggaataatcaattagaggaacaatttgttgacactttacaacaagaattagataaagtttatagttttttcaaattaaaacacaaagaaattttaagaagagttaaagaaattgaaagtttagttgaaaaaactgttcaagcctctaaaaatgtaactgatattcaagattatgaatattttgaacaagatttccaagatttagaggaagaattatctgatataattgctgatgttcatgatttaaatacttttacaagattaaattatattggtttccaaaaaattttgaaaaaacatgataaattaactaaaatgattttaaaacctattttccaagcaagattaaatgcaaatcctttctttaaagataatttagatggtttaattgttaaattatctaaaaattatgatttagttagaactaagggtaatcctgttaaaggtgattcatcagctggtggtaaaatgcaaaatttcgttagacaaacaactaaatattgggttcatcctgataatataactgaattaaaattaattattttaaaacatttacctgttcttgttttcaattcaaataaagaatttgaaactgaagattcggcaatttcttcaatttattttgatgataaaaaaatggatttatattatggtagattattgaaaactgaaggtgcagaagcaattagaattagatggtatggtggtatgtcaactgaaacttgctttattgaaagaaaaactcatagagaagattggactggtgaaaaatctgttaaggcaagattcccaattaaagaatcaaaagttaatgatttccttaaaggttcatttactgcaaagcaattatttgaaaaagctagaaaagatggtaaaaaatcaaaagaagaaattgattcattagagaggttagctcaagaagttcaatatagagttttaaaggataaaatgagaccagttatgagaactttttataatagaactgcatttcaattacctggtgatgcaagagttagaatttctcttgatactgaattatcaatgattagagaagataattttgatggaattgatagaactaagggtaattggagaagaatggatattggagttaatttcccatttaatcaattacctgatgaagatattgaaagattcccatatgctgttttagaagttaaattacaaactcaaatgggtcaagaaccacctcaatgggttagagaaatgatttcatcacatttagttgaagcagttccaaaattttcaaaatttattcatggttgttcaactttattacctgaaatggtttcattagttccattttggcaacctcaaatggatattgatattagaaaacctaaaaaggatgcaacttatggtattattagtaaacatagattattagaagatggtagtaatggtggacaaattgatgaagaagaattaattggttcatcaacaaattatggttcagttcaaattaatgaatctcataatagaattgaagatgttagtaataatactaaaaatgaaggtttattagctcctttaattgatttgtttcaaaaatatacaaaacctgataattcatttaataaagttccagatggaacgatttttgaaactgcattcacagctccaaagggtaaaaaaattgcagttccagttcgtgttgaaccaaaagtttattttgcaactgaacgtacattcctttcatggctttcaatttcacttatatttggtgcaactgctcatactttattaaattatggtgatgttatttcattattaactgcaggttgcttttatttaactgcaattttaactatattatattcttcaggtgtttacgttttcagagttataagtattcgtaataaacgtgcagttagatatgatgatcaaataggtccaagacttgtttgtggtgctcttgcattttcagtttttgtttctttcctatttagatacttgaaataataataataattcatttctattcatatatacactttcttaattaatttatatcaaaacttttataataattgtacatttcaaacagttaaaattgttatttccatgatatcccggcgataagatttttttttttaaattttcaatacatcatgcaatccaattatcttttaaagagataatcaatcaaaagtaatacaatagaatatatagataccatgtctggagatataatagaggaatgccatactgtagcacctgtaatagaatttaattgtgacacagaaatttgtgaaactaataattccacagaagatatacagacatttcagaaaactgactctgattcagaattaaacaatacttcaacatctaattttaaagatacaacagatttagaacaatatttatcagaactattaataggattacagaaacaacaagaacatcaacaaaatgaagtattacaattaattatacagcaacgtcaagaattacagaacaatccatcatcattaaacaataataataataatattaatccaccaatttcatttaatacattatcaccaccaattgtatcatctgcatggacttttacacaaggtttaataataggtcaagtatcagtaattatattaattgttgcatttattaaattttttgttttcactgaagcaacaccaactcaagcaactaaaatacccacaaagaaggatagatcagtaattaaaacaagtaaaagtgatgaaattgatttatcaagattgaaggcaactccattaactagactcagtgctgaaaataataataataataatattcctaataatacaccttctgttgatgatggaacaaaattaaaggataatttaactcatttaaaagaagttaataaagcattaaatgcaggtaaagtaaatttagattttgatagtacattaaattcaattttagagaaaacttattatgatgttaaaactcataaacctgaatcattagattggtttaatgttttagttggacaaattattgcacaagcaagattagaggcattaattgatggtaatatttatgaatcattaaataaagcacttaattcaccaccagttttacaatattttgatgcaattaaaataactgaaattaatattggtgatgattatccaattttcagtaattgtagagttcaaaataatgaaggtagattagaggctaaaattgatgttgatgtatcagatacaattacattaggctgttaataccaatttattaattaatcaaccaaaatttatgagtgcaagtttaccaattaacttagctatatcagttgttagatttagtgcatgtttaagtgtatcattaattgcaactgatgatgatgattttaatgttgaagataatgagcatggtaatgcaaataataatgtaaataaaaagaaaagagcacaaaatattgataataataataataatactacagataattcaaagggtcattcaattgcattaatgttttcatttagtcctgattttagattagaatttgatattaaatcattaattggttcaagggcaaaattagagaatataccacgtattaagttcaatacttgaaaatgttataaggaaatggtttattgaaagatgtattgaaccaagatttcaattaattcaattaccttcattatggccaagaaagaaaactacaagagaaaatgttccaactgaatagagtaatgtatatagagttttttattataaggataacatacataatttagaaaggatcttcaaaagcatcttcttcatcataatcatcatctttttcaaattcataaacaattgaaccaccaacactacccatactttgttgagcttcaagaaatggtaaatcaactttatctctttgttccttttgctttttagttgtacctaaattaaaagttgttaaattttctaataatgattcatcatcaccagttgatgcaggatttgcagaaattatatattcatattgatgattaattgaatcaattaaaaatttataatctaatgatctaccagattttcgacgataagttaattctgtataaaatttagtttgatgaatatctcgtatatttaatgggaaatgtggaccattttgtaaaagtaaataataatctgaatctccatcattaaaatttattggtttaatatcgaaaacacatgatgataaataatgtaaatatgaataacttgaaggtttatttttattatttgtatcaattaatgatggtatatcttgaggataatataccatatatgatatttgaaggtttcattaaaagttttaataataaaacaatttgatcattcggtatataattaaatgaatcaataattataagtttttttctatcatcaggtaaatttgataaattttgattaattaatttctcaaaatctttatctaatagatttataaatctatcttttgataaattaagatatgatggtggtaatggtgtctcaaatgataaataaataattgtcaattcaggattggtagatttagccttattaactaattcatttgttaaaaatgttgcactttgaataaatgtatcactaacaagaatgaatggacatgattctctcaatgagaaaatacgatttagtaaaactgttggtgaagcaactgatgctgacattagttattgaactgggttattaaaaggaaattgtaatttgatgtcttcagtgaaatataatataaaatttgtcaatattcatgattcatgttacgtaaaattttccgtgaattattccattatgtctatcttctttctctttattttttacaattaaattactagcttaaataaatctataaagttatgaatatacagtataatatttgattatgatcattgtatattataaggtttgtattgtgtacaatttaaaatatttgggaaatttgtaatttcataatttggatgatgaactttacattcaataaagttatcttcaagtctaccatcttccttacgaactttttcataatcacaataataagctttattaactaaaaaagttatttttctactttgaaattctaatacatcaatatcatttgaaatatccatttcttcagttttttcatcttcataattatcagcagatgcaattgttggatcataacaattattttcccaatatttaccttcattatctaatggaatattaggtacattaataatccatttattaactttatcagtatgatgcatattagattctttccttggattaaaggtatccgggaacttagtatgtaatgatattgacgactctttttggtatacgttttctgtattattattatttttattagtatcattgatattattatcattatttacaattacaggtgatgtaatatctacattaaatttaccatttccaatattaggagacattgcctgagatagataattaattgtatgattaatatcattactattagtcaatggagttttagttttactctgaggtaatttagaagtcattacaaaagttctattccttgctatcagaagaataatataagaatatcaacataatagaaaagaggttaatagcagtagaggcagtattaattaaagaacagggcaatattctataagtattatcataatggccgtcccatcgacgtgtctggggctcaacattatttttcaattactacacgttagtattatgggatggcaagacatgttaatcattatttaagattggtttcttttgtgcaatagatagttagagagaatgggtgttcatggattatgggagattcttgcaccctcttctagacctgttagagttgaagctttgagaaataggaaattagcagttgatgcatcaatttggatttatcaattcttaaaagctgttagagataatgaaggtaatcaaatgaaaaattctcatattgttggattctttaggagaatttgtaaattattatattttggaattaaaccagttttcgtatttgatggtggtgtaccagttttgaaaagaaaaacaattcaaaagagaaaagaaaaacgtgaaggtaatagagaaagtattcaacaaattgctcataaaattttagctaaaagattacaagaatttgctgatggtaaattatcttcacctaaaaagccaaaaagaagtgtaaacacctctacatccacaaaggcaacaagaattgaaaaaccaactaatgaattatattttgatgcttattatgatgatgaaaatggtattacaaataatggaaacaccgaatcatcaaccacaattaaatctaaaaaacctgaaaaggaaagtccaatgtttaaacaacaagatgaatatgatttaccattactgaataatggtattaaaaaagattcttcagatactagacttatggcagataatgaatatgaaagattaacaagtgatattaaggatggattagatgaaattgatttaaataatattaatccgcaatctaaagaatttacaaatttaccattatcaactcaatatattgttctttcacatttaagacttagatcaagattaagaatgggttatactaaaactcaattacaaaaattattccctgatccaatggaatttagtaaatttcaaattaaaatggttcaaaagagaaattattttactcaaaaaattatgaatgttacaggtatggatggtgatattaatgatgatataatatctagaagaattgcaagtgataaaaatcgtgcatataatttaaaacgtataggtgatggttatgcattatctatttcaaaacaagaattggatggtgattcttataagaaacctgttttcttagaggataatattgaaaaacctaaaattgaagaaatttcagatcatttttatagtgataattcagaaaatgatgatattgattgggatgatgtagaagttgtatcagagagtgttaaaactgatttcaaaaaaccagagaagaaaaagaaagagaaagaggaaaagtggaaaaagtggaaaatccattgttccttcaggatagtgatgaatcagaaaactcggaaaatgatgatgatgatgatgatgaaagtattgaaatggaagatgtaactgatgcacctgtttacaaataatacagaagatggtgaagatgaaataatgaaacaaattcagtatttatacgattactctaataaacataacaagagaaaatcaaatgaaaacagacactgtacctgaaacagaggaaaaagaatttacagtcatctctgatgatgatgatatggatgaatatcatgaaatacaaatcaaacaaattgaagaagaagaattaagacttgcagttgaaagatctaaaaatgattatttgaattctttagatgaagaaaaaaatggtaaaagtgaaaataataaattaaatgatgaagttccaattattttaagtacttcaagtttagcaaaaactttaaaactacctaatttttcaatgaaaaataatttactttttggtggatcatcaaatgtgaagaaatcctgaacctaaaaggcaaattcaaccagttgttgaaatatctgatgttgaagatcttgatgatggtaatattaatcatttaaagaatcttaataatgaagataacaaagatatcgaggaaaaagagaaagaggaagggaaagaggaagaaaagaaaaaacctcttccattacctgaatggtttaccaatgcaagtgattttaaagaaccagatgtcaaagaaaaatctgaaaataaagtacaaaaccagactaatgatgaaaaggctggtttgatatcatatggtgatgttgaaaattatttctctagtgatgatgataatgatattgattttattgaagtgacaaactcaaagaatgaaattgttgatttagaatctgaagatggaaatggaattaatgaatggtgaagtgattgacctagatgatgtagatgaagagaaaaaagttgtggatacatgttgatcaatttgaaaatgaaaatgaaatgaaaataagggtcctaggggacgtggagaagatacattgccacaacatgtaaatgtgggaaagtccgctgatgagccatcagaggcttataatgtgggcactgtgagaaacgatgaggcagaaaattcagatagaagccacagtattgaaacctcaaaaccacagaatttaatgaatgtgttaagtggtaataaatctgtgaatgatattgatgaaaatgatgatagtggagatgatgatttctcagatgaggatgaagtaatttattacttagatatggctgatgaaggatcatcatataataattttattgataatttacaaaataatggaactaattcaaatgccaagacatcaacatggaatattgatgatgaagctaaatttcaggaacaattaaagaaacaaaaacgtgattctgatgaagtttcaactaaaatgatttatgatattcaagatttattatcaagatttggtataccattcatcactgcaccaatggaagctgaagcacaatgtgcagaacttaaacttttaggattagttgatggtataattacagatgattctgattgtttcctatttggtggtgatagaatttataaaaatttatttaatgataaacacacagttgaatgttatcaaaatgatgatataatttatgaattaggtattaatagaaataatatgattgaacttgcaattttattaggtagtgattatactgaaggtattaaaggtgttggtaaagttactgcaatggaaattttaggagaatttaaaacattagagaaatttaaagaatggtgggttgattatcaacatggtattattgatactagtacagatacaccaattagaaagaaaattagaaagaaattaagtaagaaattatttattggtaatgatttcccaaataaattaatttatgaagcatatacacatccagaagttgatcatgataaaactcaatttaaatggggtcaaccaaatattgaaaaattacgtacttatttaaaatataatattggatggaatgaagagaaagtagatgatattctttcacctgttattaaaaatatgggtaaaccacagacaagtattgaagaatttttttcagttgaatcagtacagagacgtcgtaaattagatttaagtaaaggtattcttgatgcaactgagaaattgaaaagaatatcaaactaagaaacgaagtggttatggtgatggtgatggaaatgatgaatcatcaacttaataagagactgaaagtgtaaaataggacaattttattgtagactgtatacaatgtagatatttatagttaatacccgtatttccaaatatctttagcataattttcagtgagttctttatcttcaccatatagtgattgccaattactaaatccacctcttaaaatgaaaatattcatattttgaataaattcaatttcatcattatcatttgaattgtccaatttttcatttaaatatctcataaacttcattgcactacttggacctctctgttgacttaacatacaatgaaatataacagtattttgattcattgtttgtaaattatttaataatgatgacattgttgaattatctttaaattttgttgattcaatatgtttacaattaattatatgaccaccaatataatcattatctctaacatcaattacttgaaatttattacccatattggtatgaccttgtagtatccatgatttcaatgtttgtggttcaatgaatttgacatctgatactgtaaatatttgacgtgacatgatggttatgaaaagaatggaaaatcaagaaaaacgtaaaataattctttatagtttagtttagtttatataaataatttttaaaaatacaaggttacatgaacagcggtaacaaagatactgtataaaaatagatgtatagaaatacacatagaaatggaaatggaaatggaaatggaaataatcattaaatttaatcttgtaaagttttctttagaaactttctttggagttttctttgcagaacctaagatagcctttggttttgactttctttggagttttaatttgtttaacatcattggatgaacttggtaatgcttttctaggtgttgatgttctacttgataattttttaacatttttagacgttatctcagatgatgaattatcaccttcatcagttgaatcaacttctgattgtaatccaacccaatccataaaatttcccaagatacttttcttattattattcttattattattaagagatttacttaatccattagcattatatttaagagcaaatttatcagcaggtgatttaccattagttattgaattattaaaattattatttattaaagattctctaactaaaatgtataaatctttcgttaaatgacttaaattatcattagtttgtttccaagaatttttaaaatcagttatattttttttcagttctaattcatttttctttaaccaagaaacatttaattcttgtcttgttgcacctcttgcaaaatttctcattaaatatttatcataatctctaataattttagtaattatatcacttgttgaaataccttcagttctttgagttgctaaaaacatacctgcctttttcattggtaaataaatatcatcaataccatctgcaacatatggtaaatcatcatgagcacaataatcaattttattatcttttaaaaatttcatacttaaaatccatggagcatcttcaattacttcatcaacccatttacaatgtctaacagtttcatatctttgtttatcagttaatacggttaaacctttccttttatgagtttctttatcatttggaataccaacaactaattcaacattattaaaagctttcttacattgttctaattgtctcatatgacctaaatgaaataaatcgaaaacaccatctgcataaattctaattggtctatcctcaggtggtggattcattttaaaacctttaggtctccatttcctatattcaggttttaataattcatcaaattctttctccttattagaaaattcaactttcttcttctctatttcagcttcctcttcctttgacattaattttttcttctttgatacatgaccatcttcaacaattacattgattctctcaggttcatcaccttcttcctccttaacaggtacaacgggcacagatgaacttctttcattactattattattattattattactataatcatccccatcattatctcttgatcttttccccttccttgcaaatccaaacaaagtttcactcaaagttctagtcaatgatcttggacgcaattgaccttgaccgtgatcttggacattatcattatccccactctcagacatatcaattactatacttagtaaatatataacaaatcagatcattcaacagagaaatttgcagtgttcaaagtggaagagttgttcccaaattgaaagaaatagcgcttatagtaatattttcaccacatgtttctttaccagtctttctatctggtggctcttatggtttcctttcatttgatcaagggattagggacacaatggatctgcaaatagctcggaatttaggtcagatgttggagtctgcttcaaggtctctgaatattccatttgatgcctctagtgtaactgtttcagttaccttcatcagttacttcatttattaatactaaatattataatatcgaaacttcattatcaaagaaaggatataataaaaggattggagagtaatagtgatgcagaaatatatactgcctttaaagcatctagttgggaaattagcattggttgatgaatctacaatatcagattcaatgattaatgatcaagattatgattataatgattataatgataatagtattgtaaaggaaattgttcaattattcccacatattgttaaaaatgttaattcaacaaatttaaagattaaaagattagtttatatattacttttaagatttaatcatttacaacaagatatttcattattatcaattaatgcaattcaaaaatctttaattgataaaaattcatttaatagatcattagcaattagatgtttaagtggtattcaaataccagctattttacctatactactactttcattaactaaattagttaaagattcttcaccattggtgagaagtgcttgttcaattgcaattattaaatgtgttcaattagatattcaatataatatgaaaagtaataataataataaaaataaaaatactatatctgatagaagatcatatttaattgaaaatattaatattgaaggttcaaatattcaacaattataccttttattagatatacttttaagtgataatgattcaaaagttttaagtttagcaattattgcattttatgaaattttcaatggttgtttcgatatttggcataataaaattaataatttaattaatcattttgatgaattagattcttttgcaattgttaatttcttagatataatggttgaatatattaaattattttatccaaagataacagaatcaactattaccaattgaaattaatcaattatatgaaaaaattattgatcaaattgaatttgaaatgaattgtaatgttattttaagtatggttaaatttttaattattttattcccatttaaacttcaaagtaataaattattaaataaagttatgattaaattaattcaaaatgattataatgattcaattgataataatggtaaaatatttatttcattaaatatgattgaatatttaatatctaaagatatgataaaatttaatgattatcaaattaataattttataccattaagtaatgaaattgaaaatttacaaatatttgaattaaagattaatatattatttaaattaattaataataataattttaataaaattttcaaagaatttaaatttataattgaaaaatcacaattcccaataatttataaatttaaagttttacaaaaaattaataaattaattttattaaatattttaacaattgaacaattttctcaaataattagatttttcatgaataaattaacaattgaaaaaaataatttattagttggtgaatatattacaggtttaagacaattaattcaatcaaatttaatttattatattgatatattaattaaattatcaggtaaattatttaattcatatatgaataatgatataatacttgttaataatgcgaaaagttcaattatttggttattaggggaagttttcaattaattatgatataaataataatacaaataatgataatgaaaaatgtcaaatattaaagaaaatgttaccaaatattgcaattaaattaattgaaaattataaatttgaaaatgattataatgttagatatgaaattttaatatttatgacaaaattaatgataattaatataattaataataataaggataattatcaattaattaataatgaaattttccaaatttttaattatttattattattaagtaaatttgataataatttaactattagggatataagtagattaattggatcaatattaccaaatgttatttattttacagatttaaatattaaagagaatttaaatattgatgaattattattaaatgattcaacattattaaaacattgtcaagataaatgtttaaatataaatattgcattattaatgtttcaaataaataaacctcaattaagtattaataatcaattaaataatttagaaatttataataatattgatcaaagtttattaaattatttgaaaagtgtgaataatgaattagatatgggttatttaaattattataatgatttaagattaaatgaatttaaattaattgattataataaatttcaatcaagtttttcatcaatgtcaattaataataataatgaaacacagaaggttaataaaccagtacaggaggtgactaggaaacaggaaaatgttgccaaatatagattacaatcattagatgatttccttggttcatagtgtgtatagattttgtatagcttgataatccaccacgacatggaatttgtgatgtttgtaaaacttatttgtctttccatcgtataatatcaattctttgataagtaaatgtctgttatatataaccagtgttgttataagatgtgttatttagtatagtattggctaaaactatcaattttgtgaattcattacctttctttaaataaaagtatctaatctgtaattaatgaaaacagtttagttattaaaatacttaaatttcaacatttttcaaacactactaaattacaccaatgaaacactccagtctctttacaattcaattcatctatacatcaccatatatctaactctattacacttacaatacctaaaccaataaatacattaaatacactaaatacatcacacaaaattacgtaatcatgtataattccccccattaaattgaaatttttcactaaggaatatagaacatctttagctatactgtatactttctttagaccaaaagcaatgtcatttttaggatttggaggtaataaatcaacagaaagtacacctgtattagatccaacacaacaagaattagttaataagattaaaaatgaaattcaacaagaattagcaacaggttatgcaacttcattagttaatgcattaactgaaaattgttttaataaatgtattcaaaatccaaaacatccattaaataatgatgaagagagatgtattgaagattgtagtggtaaatttatgagaagttggaatataattagtcaaagttatatatcacgtataaatcaaaaagatttgtaataaattcatgtctaaaatgtgtaatgaaaaaaaaaaaaattccgtatatatatcttgtaagtacgtttcttttaataaggatgatgataataagacgttgttatagtaataatattagaacacatattagaagaacaattaaaccacctaaaccaccaatttcacgtaatttaaaatcaattttaaaaactaggacaattgatattagaagtgaaattgataaatttattgatgaaaatgccaatattgaaaaacaatggttgaaaatattaaatagtaaagagaaaattaataaagatcaaataattgaagaattattaaagaaaattattaatagtagtgaaagagagaaagatgaagagttgagtgggggtattaatgaagctttaattaatcaagttattaaatatgatacaatgtatggaccaaagggtgaaggtaaagataattatcctaatgagataagagatgggaataatggagtgtagagaaggtgaagatttgattaatatggttaagatatatgatatttattttacattattaaagaaaagttttattattaagaatattgaaagaagggaagaagttattagaaatattgggattaatggagattatgataatggattagagaaggcaattgaagataagaggtatgaagaagttgaagaattatggtataagattgaaaaaccaagaaatttaaatatttattatagtagttataataaattgatgaagttaataaagaaggaaggtaataagatgaatggtaaatttattgatgaatttttaaaagatttaattatatcagatattggattagaatatgatgaaattgatattatgattaataatattattagatttcaaaaatttaataaagaaatttatgaagagattaagaaagaattaggaggatgaatttaatttaaagattagtttagataattatttaaattttttcaatggagcattaatgaataatgaatttaaattatgtgaaaagattattgaagatatttataagggaaggatatttattagataggaaattaattcaaatgatgattgaatattatggtaaaattggtgatgagggtagggttttcaagatggtggaatatatgattaaagttaataaaatgaagatgtttagtaaagattgggaattgatgattaataatttaatgaaaattgggtatagaagtgtaagtattgatattataaagggattaattataattcaagatggattcgagggaaggatatgaaggtaatgataatgataatgatattgatattgaatatgataataagataagagatttagagattttcaatacgagtaccaaatcatttgaaaatgatattataataatcaagccaaagattacaattgatatgattaataatatactaataagtagtgaaaatgttaaagaattatgagagattaattgatattatagataatgaacataataaagaattaattaatagtggagaaatttttaaaattgaattaatggttaaacatagatttgaggtgtttacaagtagggaaatatttagagaatgtgttattggagggttaaataggaatgaaaattgaagaaatggataaatttgtcagtgatgatgagagtataagggttattacgagtatatgtggagaatggattgaaagtgaaagtgaaggtgaagatgaagtcataagggcatatggtaagttactcagtgggttaagtgataacagagagagattacataatgtgttaattgtggccggtatttccgtgtagaatagtatggaatgagtcaactatgggatattcactgtggtggtgataaaattagtaagtgagtaatatttttatttttatttttattatgagatgactctgaaaaatttattttattttactgtggcggagagatctgattatggtatttaactatttaactatttgggtttccagtattttgtgtattattccttttgattcacttctcttcttttagtaacccagtcttatcatgtcttccactgcttctcaagatttctttgtgcaaactcacatgtgtgcttcaactcctaataacttataactataataatataattaattacaatactataatatcatcatctaacaacgatgataataataatgagcaattaataaatgaaactacaacagattcctgatgaattatttgaaattgatgatgttgaaacatgtacttattccaacacaacaccaatttctcaaatttcccattcccttccttcacttatgatggatttatcctctgatgatgatgaagattttgaattagatttcgatgaattagaatcaattgatagaattccaataatggattcagctacaaatacatggtcaaataatttattttcaccaaatttacgtcctactttaccatcaaagaataataataataataataataataataatagaaatttatcatttgattcattattaaataataaaaaaagtagtattactatcactaaacaaagagttcattcagttactgaagataattataatatatggttatcaaatatataacacattgtacttacactttatgactacttctttgctttactaatgatatacccaattactgttactatttattactatactctatatactctatataaatataaatattaaaaaacaatcttatacttacatgtcgatattattactattactattactattactattactattactattactattactattactattactatactctatactctatataacctacctataatactatctccgataaaacctcatgtcacccccgcacacgtgtctggcccaattttctaaatttttactatgatgacctgcctatttaggaaatattctataaaatttcaatttaaccgcgttttttcactttgtttcatcttcatctttaaacactctataaatacctttccatggtataacataaactaatgtaccaatcatacaccatgttgttataattataactgtaaatccataaattgtacttaaaatttgaaatcctcttatatttgtaattttataaatttctaaactacttaaactaatagttccaaatgggaatgttgctgcccacattgttggtgtccaatatcttactttattatattttttcttattattatgataactatttggccatccaatataccaatatccaattgttaaaatcccccaaattgttaataatataccaaatgataaaaataatattgaaattcctaatccttgtattttaattattttatcaataattatcaattgtgtttcattattaacaatatttgataattttaaatatcttattaaattaatactattaagtaatatagaaaatcctccctgtcccattataccaattggaacaaacattgtaaatgaattattaaattttggtaatccaaatgttaaaatctttgtaaatattattggtatgaaaacaattgatgatgtaattgcaactccaaataacataaatgtaacaattatcatcgataataaatacttttcaccatcaataattgaactaattaatgcaccacttgcacttgtaactgttgttgttactaatggtaataaatatgctggtgttactttacttaaaaattcatttttctctcttaatttattatgttcgaaaaatccttcctctaaatgttttttttgataaatatttgttggataactcaataagaaaaatgtaatgaaaaaaatacaacaaattgcctggaaaaaattaatccaccataatgtgaaaattgcagttttccaatttggtttaaggaaaaataacatattaatcattgttgtaaatgacattgatgatgcaccaaaataaattgttaaatgtggttcatgtaatatcttccaaattttttccattttattatatttacaaataaataatgaatgatttataactaatataactaaattaatgaaaaaatatattataccaacaaatttcatacctttttcaattgatttaatggggaaattatacattatacctgatgttataccaactcccatacttgcaataaaatgtaatggatgatatgattcaattattaaatcaattgatttatgaagtttattcatgatggtttgtgtatagagaagataatattacttattcaaagataattatttgatgataagagccacagttattaatgtagtgaaaaaatttttattctttaatgtaaacatgtaaacatgtcaataatgtattaaaatattttacatatcttcgataatgactcgataatgactctaagtaatctactaatgtattaacaaactccgatgtgctattataatactaatatcacactccgtatattaattaaattactgtaaatgttaattcagttataatacaatgtaaagctacggactttgaaaagcaatagaatgacattacgtaacacgcacgtgactctgcgactatgagtcgattgctatttaaaatatttatacgaaaattatacgatcgtatacgagtcgtttgatttttctattaattttcaattttcaattttttcgtgttgtacgttccacaaaggctcatttggctcatcttgatttcttttagtttgagtttgtttctttcttctaatcacaccctcttatcccacaatgacagttcaaaatgttggtattaaagcaatagaattttatattcctggtcaatatgttaatcaagcagaattagaaaaattcgataatgtctcacaaggtaaatatacaattggtttaggtcaaacaaatatggcattcgttaatgatagagaagatatttattcaatgtctttaacagttttgaaaaaccttattgataattataatattgatattaataatattggtagattagaagttggtactgaaactttattagataaatctaaatctgttaaatctgtacttaatgcaattatttaaagataatactgatattgaaggtattgataatattaatgcttgttatggtggtactgcagctgttataaatgcaattaattgggctcaatctgattcttgggatggtagagatgcaattgttgtttgtggtgatattgcaatttatgaaaaaggttctgctagaccaactggtggtgcaggtactgttgctattttaattggtccaaatgctccaattgtttttcgatccaattagaggttcttatatggaacatgcatatgatttctataaaccaaattttacaagtgaatatccagttgttgatggtcatttttcattatcttgttatgttaaagcagttgattattgttataaatcttattctaaaaaggcaatttcaaaaggtttaagtaaatctgaaaataatactgttggtattgattttttcgattataatgctttccatgtaccaacttgtaaattagttgcaaaatcttatgcaagattattatataatgattatattaataatccaaatattttacctgaattagattcaagtaaatttattaatttagattatgaaactacattaattgataaaactgttgagaaaacttttatgccattatcaaaggaaaaatttaataaaaatgttaaaccttcattagaattaccaactaatgttggtaatatgtatacaggttcagtttggggttcattatgttcattattatcaattgttggtaatgatgaattacaaaataaaagaattggtttattctcttatggttcaggtttagctgcaactatgttatcagttaaaattaatggtgatatttcaaatattacatcaaaattaaatgttaaagaacgtttaattaatagagaattgaaaactccaaaagaatatgaagatgcaattgctttaagagagaaagctcatttacaaaaatcttttaaaccatcaggttcaattgattatattccaaatggttcattctatttaactgaaattgatgataaatttagaagattttatgaaattaaaaattaattaaaatcttctttacattgctaagctattatattatataaacaaatctatactttgctgtttgttcttgtttttttcttactctttcttatatataattctttattaaattaaattaataatatttattttttttttaattagaaaaacaaccttatacaaacttatacttaagaaactacgaaaataattgcaccaataatcatcattgatgcacttgtccaccaccataatgaataattaatactatctttcataactgcattagttttataactattctctaatgaacgtttaattctatcagataaacttaattcagatccatattgatttaaatctcttttcttaagtttagaaccaacattttcagttgcagcaggattcattgtacttgttggtaacatttgaggtggttgataagctaaatataatggttgcataatttctccattacttttatgtaaatctaatctccatttaccatgatatggatcaacataaacttgataagttttaaatttttcagtttgattatatcttgaatacattgaaattccactatcattacaaggttgtgataataattgtctaccatcaatttcaaatggtgttaaagttaatgaaccatcatcatttttaatccatgtaccatgttgaaaaattaaaattgctgttggacatgaatgatttttagcatttggtgaaacttgataaattgcttcttcccaaaatccatcttcagtgaaagaatatgaaattccaggtaatgcaggttcaattaataattcatcaattggatcgaaaaatgatggtcctgtgaaaacagtatttgcttttgatgaccatgtaccaacaattgaatcacttacaagatttggattaatcgggtcagcagatgctgaagaacttgctgaggagcttgatgaggagattgatgaagaacttgattgaggagctgttgaataacgtatcaagtatcagtatcagtatcagcgattgtggttgatgatgaacttgatgtagttggtgtaacaggggtagctgtagttggagtagttgctgtagttggagtagttgctgtagttggagtagttgctgtagttggagtagttgctgtagttggagtagttgctgtaacaggtgtagcagttgtaacatctgttggtgttgcaatagtatttgtatcaatagtatcagtatttgtatcagtatctataagggtattagtattagcagttgtaacagcattaacagcagctgctgttgtagttggaactgtagttaaaactgttgttggtgtagtatttattccttgagctgcatcagcggcagcaactgcagcatcagcaacatcatcagcgttaactatttgagtgagaacaaagagagaagtcaataaccaagcctttatttgcatctttacgttgttaccaagggattaaagaaaggaaagaagaaagaagaaagaacagtatagaaatgaaaatagaaacaagatataaatatagaaactcatgctataaaaatttaagccacgaaaaatttatcttatagtaaatgaaaggtatatactgtattaccaggtctggatggcaaatatggggatggataaacatcagttgagtaaacaatacaccatttcaagggatattgtcgatgaaggtaccttcatttgaaacagttggaaacattaatgatgataaaatcaataaaaagaacgaatttattcaaaatagattaaataaagataaagatagaggtagatcaagatcaattgaaatatcagtagtaagtaatgatagggataaaacacctccaagagcagataaagatcgtatacgaaagaataggaagcgtaaggcagaagttgaacaattcccaattattaatggtattccattaactgatgaatttttagatagtgtattacctgatggatttaaaattatatcaatacctaggagtactaacggtatgacaccacctgatatttcatcatttaatacaaaatctaatggaattttactaaataatgataataatgaaaacaatattaataataataataaaaataataatatagttgaaatacctaaattatcagatttaaaggatttacaatattttactgatttagattctaaaattttctataaattaacaatattgaaaaataattcagatattgaaaaattatcacaagatgaacaattagagattaaatgtatgaaacttatattaaaaattaaaaatggttcaaatttatcaaggaaacctgcaatgaaaaatttaactgaaaatgcaattaaatttggtcctaatataatttttaatataattttaccattattaagtgatgaacaattagatgaacaaagtagacatttattaattaaattaattgttaatataatgtttaaatttgattcatcattaattaaaccttttacaaataatattttaactgttactaatgcctttattaaatgatgaaaataaatatacaagatctgaaggtaatgaattaatttcaaaattatctaaaattgttggtttatatacaatgattaatattttgaaaaaagatttatcaaataatgatgaattaactagaaatttaatttctaaaacttttgcaattttagcaaatacttttggtattaaaaatttattaccatttttaaaaattgtttgtaattcaaggaaaaattatctaattagatttacaggtacaaaaattattcaacaaatttcaattttaatgaaacattcaattagaccttttattaatgaacttatattaattatttctaaaaatcttaatgatgaaattctaaatgttagaacaattacagcttcaactatatcttcattaattgaagcttgttatccatttggttatgaatctttccaaattataattaatccattatttaaaggtttaagaaatcatagaggtaaaccattatcatattttattaaagcttttggtaatttaataccattaattgataataatgatgatttaaatttttattcatttgaattatttaaaataattaaaagagaatcaaataataatattaatgatgatgaaattaaaaaatcaattttaatttcaattgaaaaaatttgtaaattaaacaatttacagggaaatataattgaaaattcagatttatcaaatactttttttaaaaatttttggattagaagaactgcattagataaaaaaattgttaatttaacaattaatgcatgttattcattatcattgaaaattggttcattagagacaattattaaaattttaccatttttaaaggatgattcagaaccttttaggaaaatgacattagaggcatgtgataaagttttaacatcatttggtgcatttgatttagatgataaaactattaatagattaattgatggtttattatattgtttacaaaatcaaaatcaaattaatagtgaaaaaaataataaaatttcaaatttaattatattaaattcatttggtaatataatgaataatttaggtgttagatctaaaattcatttaaagaaaattattagttcaattttatttagattaaagaataaagatccagaaattagagaacaatcagctgatttaattgttcaaattgttgatgttttaaaaatttgtaatgaagataatcaattaattagattatgtacaatattatatgaatcattaggtgaagtttatcctgatgttttaggttcaattttaaatgcattaaggaaagttattaataaaattgataatattgaatcattgaatccttcaattggacaaattttatcaacattaacaccaattttaaagaataggaatgaaaaagttcaagaaatgacaattccattaattggtgatattgcaattaggggtaaaaattttataaataataaagaatggttaagaatttcatttgaattattagaaatgttaaaagcttataggaaaaatattaggaaaagtgcaaataaaacatttggattaatttctaaaattattggaccatcagatttaattgttatgttattaaataatttaaaagttcaagaacgtcaattaagaatttcaacagctgttgcaattggtataattgcagaaaattgtaaaccatttacaattttaccaattttaatgaatgaatttagatatcctgataaaaatgttcaaaatggtgttttaaaggcattatcatttatgtttgaatatattggagaaatgggatcagattatatttatgcaataactccattattattagattcattaactgatagagatttagttcatagacaaattagtgcaaatgttatcaaaaatattgcattaggtagttattgtcaaggttatgaaaatgcatttattaatttccttaatttaatttggccaaatatttttgaaacttcacctcatgttattttacaaattatggaatcaattgaatgtttaaatattgtacttggttgtaatataattttaaaatatatttggtcaggtttatttcatccttcaaggaaagttagagaaacttattggaaaatttataataatatttatattgcaagttgttcatcaatggtaccatattatccatcatttaaacaattaggaccaggttttaggaccaattgatgatacagttgattcaaaattaactgataattattcaattgaagagttagatctttgggtgtgatgtaatcaaagaaggctgtgcatagcatgaactgaatgaattgttgtttcatgttgtttttgattctgtttcatgttgtttcatgtttcttttaagtgagcgtctattgtctgctggatggacgtagtatgatgataataacaatataataataataataataataattaattagtaatttaatattatatgggaggctgtattttgtatattgaattctaacttcatttcatttcattttatttctcttataatttgtatattctatattggtttggttgattgattagttgtttatttgttagttttatacatatttctctataattgaaatatattcttacattcattaactatcatatatattatataaatacattcgttttttcaatttaattcataagcatataaggaaataataatgaatatagaaactgcattacaaaagcaatttgaattatctaaaacacttaataataatgttaatattgcacaaaatgcatcacatcaattaacattacaattaaagaaaattaaacaagagaatcaagatgcaacattaaaatcaatgtcaaataattgtcaaaagaatattttatcaaataatgaaacaaaatataaattaaataattataaaactttaaaaggtcattttgataaagtttcaagttgtgcatggtatcctgataatcaacatttagttacatcatcacaagatggttatttattagtttgggatgctgttaaaggtttaaaaaataatttagttgaattagatgatccttatataatgggatgtgatgttagttataatggacaattagttgcaactggtggtttagataatacttgtattgtttataaattaagtacaagtattgataatgatgataataataataataataacaataataagtacaggtttattatcaattttacgagatcataaagaatatatttcagatttatcatttttacataaatcttcaacacaattaataacatcatcaggagataaaagttgtatattatgggatacatcaaaaggtggttatatacgtcatttttatggacatttaggtgatgttttatcattaagtattaataaaaatgatttaaataattcaaatccaaatttatttgtaacttcatcatcagataaattatcaatgttatgggatataagagatccattagcaagtagaaaatatttagttaattctaaatttgattcaagtgaaattgaatttttccccgatggtaattgttttacatgtggttgtgatgatggtacaattaaaatgtttgatatacgatgtgatggtgaattatcaacttatacaattgataaagttcgaaaatatattaattcaaataatttacaaaatacaataccaacatataataattacagtaacaataataatgatcaaaattcaacttttgatattaatcaagatcaaaggtcaacatctgttagatcattaatgagtaatatgcaagcatcaattgataatcctggagttttatcattagatttttctaaaagtggtagattaatgtttacatcatatgcagaatctacaagtgttttcatttgggatacaataacgggtgaaattgttggttcattaaatggtcataatggaattgttagtaaagttaaagtatcatctgatggtttaggtattgcaactgcaagtagggatgaaactattaaaatttggtctgtttgatgaagatattgtaaaatgtattaattatatatagtaaatagttagttaattataatatataattatatatataaattttaaagtataaaagtatattattaaagtaaatgaattcgaaaaggaaaaagtttaatcaactcttttcttaatataatcccataaacttttcaataaagtatcaggtaaggtaaacagatccatagtaaattcaccattatcaacatcatttttaatattcatttcaggtgttctattatcattaatcatttgtactacacctaataaatcatcttcctttaatttaactaaaagttcagccattttctctaaatcaacaccacctttatttgcagcattttttgatccttttaatattttttggttcatttgcatttgttgtaacactattatttttgcgtttatcaccaatacttgatgtattaccatttaaattatctgtaccattattaataccagtattattatttaaagtattattattattaatactactattattattaataccattattattttcatcatttaacattggtacaggaccagattttgctaattcttttaataaatttggtttcgtcgtattaattgaaatttgtttatcaataacatatttctctttataaaaattaaggtcatgatttaattttttatcaccacctttatcaattaatgttaaagtaattggaatatcaaatccaccccaaccttgttcttgaattgtaaatggaggtttcttaaatgaccttacaggatttgcaaatgttggatggagtgaatatgtaactttatcaaatattgttgcaggtacttccaatcctttatcattaactaatgaaacttgaatactccattccctcattgggaaaccttcttgaacagctggaatatcctttaacacatgttgtgatgtagtaattctaacagttctcttaacctcaaccatagtagtggaacttgcactggtatattatattgtattccaaaagcaaaagaaagtgcctatagtaaccatacaaatcctgtggtcgttgcgtactttaattttgcatctcctcagttaagttaacttttcactgcttcattctcttctgtactgtactgtatcttcatggaatctgctgtagttggatgattactggcctgtatgcctgtctgtgtctcatacttacaggtagtattacacattcattaattacatttcaaaatacatttctaaataactttacttatacttctacttttacttctacttattatataacatatcctaagatacaacaaacaactgctccaatgaatcctgtaactttaacacggttaccatcattggataattcataatctgctgctggaagatcagtatatggactaaaattctctaaaagttgttccaatcctgtcatattattaccattagtatttgttccattaccattactactaccattattattataaagtgttttagtataataactttgtgatgttgaataattaactgctgtacttgatggtgtttttgatgttgtaataacattagaaaatggatcaaacacattattagaatttgtaattgttaaatcattaattggggttgttgtatctgaaataattacatttgttgaagatggtattgaaactgatgatttaattggtgatggtacaattgatgttgaaagtattgttggtttaaaagatttagaagtttcaaagaaattcttacgatcacctaaaatcatatcaagttcacctgctcccggtataacttctaaaattgatgatgatgttacaattggaattggaattgagattgatgtagatgatatagttgtattacttattggtaatgataatgaaggaggtgttaaaatattagttgctttaacatattcagttgttaatgaagttgtaatatcagttttagtttcaataataataacagaactaataatttcttcaattgatgttgaattagaaattggtactgatgttggaactacaaattctttcttagtttcagtaattacaattgtattagttggtacaacagtttcagtaattgtaacgaaaattgttgttggatttaatgtaacataaactgttttctcctctgtaatatattgaaagttttcataaactgggaaatcatcttgaatatttaaaatattttcactactattaagactatcatgtggaattgcaacttgttgttcctcaattataataggatttgataaaactaattgaatttcacaaatacttaaaattgttacaattttactaattattttacaaaacttcatcctaataaatacaatatgtttaatctatctagcaactacgtactgttcttctctgataaacaaaagaatacaaaacaaaacgaaaacaaaacaaaacaaaacaaaacaaaaagaaagaaacaaaacatacatacaaatatgataatataattacaaaaagggcattttagtatcccctaatataataaaattagttattaacaaagctatacatctatctattttttaatcaaaatattacaaattgtattctgtccaggcatctaaataaacatcaagtaaacatgatgcactccatgcctgtgttggacttgaatcttgacaaataattccatctttattagttaattcagttaatcctgcccattcactttcatgaatccatttcttatgttcaattaatctaacccaaattaattgttgtaaatatgaacttggtgtacatctatcaatattacatctatcaatttcactaaaatgtaatttagcatatgctctaaggaaaatatccataaatccaaacccattcaggtccttgatgataatttctaccctttgatgttgcaaaatcttcattatcaattccattatgataatatggtctatattctaaatctcctggatctaatgtacgtaaaccaactggacctcttaatatcttatcagtcatttgaattgcatgtaatgcatgttcttgaacaaataattctggtgctgcattatatgcaattgggaaattacctcttaattgataatcttcatattctttagttgatttatagacatctttataaattcctcttctatgaacaatacttgaattaatttcatatttggaatcatcatctgaattaattggtatataaaaacatttctcaaaattctccattaataaattatcccattccttaaatgtaatcttatcaccattttgattaataactgaatcatatttaaataatcctttctcatttaattcaataacaaatcttaaacaacttttcagtaatccaataatttcaattggtgcaccatcccttggtgtacctgggtatcccttattacctgccttagttgattctcccatcttatccatccatgtaccacaattccattgattacctccaaataaaatacctgtttcccaatcaactttaatttcaatattaaatccttcatctctcatttgtgaatcaatcttttcacctgcatttgcctctctaaactttaataccttttgcatgcctacttaaaatttcataaattatatcttcaattgaactttcaactttaaatgctctttcatcatcaaatgggaaatatgtatcatctaatgaaaatcttcttttaactttttcttttaaaatatttgatccattaggtactaatttaatataatcttgaataaattgtaaataaaaccaaactgcatcccttgcattatatcttggttccttacctgatcctaataaatttggtattaatccatgttttaatgttttaccaaaacataatatatgatcttttgcagtatcatatctaccagttgataataataatcctctacttgaaatgaatacatctctaccccaacatctcataaaatcataactaaaatgtggtaatccagctgccattgatggaattttcttaaatggatgaattgatgcattattcattttaccaatcatttgaattgaaaccattgctaatgtttgaatgaaaacagttgaattttgaattgatttagtcattttacttaatgcagtaaatcttaatgcttcatatgcaacaccaataattaatgcaaaatatcttggaataagaaaatttggtatatctttaatcttattaaatcttgtttcaagccaaattctgaaaactttaattgaattatcatcattttcataaggaattaatctatttgtaacataatctaatgcccatttaccatttctaagatgatctgataatggatgtgataaatcatttttatcaattatatctcttaaaactgatatccaaccttgaatacctgcataaactaatgatccatgattaggtattgtataaacaccagatttaccattagttgcatctctttcctcagattcacatctatataaaatacaatttaaatcaactaatgataaatcttttgcagcttcaattgcaccagttctaacaaattcatctaattcttcatcacatccaataatttgtgtttgaacaactgcaattgaaccttgaggaaaataatctggtattgaaatagttgttgatctttcatcactatcaaaattacaattaattggatctaaagttttcaattctgttttcattggatgaatgaatccatcatcattattatcattattattattatcttcatttgatttattaattaatgcataagaaaattgatgttttgccttaacaccatgtaaaacaattggttttaaactttgatcaccatcttgataaaatttagtacgtgcaattaataaataacctaaacctgtttgtgcattaattctatgaattgttataaattcattttcatgatgaacatacatttcattacgttcaatatcttcaatactttgattagcaatttcatgtctaatatcacttaataattttttaacttttgaaatacctaaatttaatccataaatatatttatttttttcagtaacaacatttaataaatttggataacattcatcaaatcccattgttgtaccatttgcacatgaacaaaatgaaactaatgcagcagttggtaaagtatcttcaattgttctcttttgatttggagtttcattatcatgagtacaatccataaataatgcatgaggttcctgtgatgtaactaattgaggaattggaatttcagatttacatttcatatcttctaaacatcttttttcaaattctaatggatgagcaggatatgcaattaaatctaatggtaaccatctaaatgaaccaattggtctacctccatgtttatgacataatcttgataattcactaacagaatttgcttgcattgcttctctaattaatgatgaaatacctaatttttcaacatataaaatatctaattcttcagaaccactaaataattctgcaacaacatataaatttggattaactgatcttgcagcatctaacattgcaacaccaacatgaattggagttgaatgacaattatcaattctaaaaccatgaaataattttgccattaatttagtatattcaaacattctatcccaaagataaggtgaatcattataatttgaaccataacgtaatttaacacaatcaccccaaacaataacttctctacgaagataagattttgattgatttgatgcaaaatcaaccaatggatttgcaccccaaatccaaccattattagctaaagcccaattttcaccattagaatctttaaatcttgtaaaataaggttcagttaatggactataatgattaatttcacctaattttggaccatttgaatctaatctaagataattaattctattaaataattgagttataattgaatcattatcaatattataagtacgatataatgataaattaatttcatctaaaattttttgagcattataataaattatatcattaaaatttgaatttaaaccataaatatttgccaaaatatttgcaaattttaaaatatttaaactatttgaaaatctatcatccaagatattaaaatcttttaatttacaattttcaattataaaatttgataattttggtaaattattaataatttcataaggtatatcaattttagtaaaacatttttcaattttattatgccaaacatcatttaatttagataaatgattattaatatcaacaatataaaattcccataattttaattcacccaaaacatgaattttaataccatcaataattttatttaaatcatcaatattattaattatagttggataatctaattctttcatattacaactaaattttaataataaagcatctaattccattgcagaaattaaatgaggagcagttttttgattataaccaacatcgggatgatcaataatccattgtgaattattagctgtatgattatatacaatatcagtcattgataaaataccatatttttcttctaatagattagtcataaatttaacatctgattcaccatttgagaagatttcatcatcaaattgtaattgatcgaaaattgaataaggagaatttgattcaccacgtttttgtaatggagtaaaatgaatcatattataacctttatttttaatattttcgaaaagtggtaaccaattttcattaaaatcattaccaacccattttgaaataactgattgcattgtaattgaattaaatgttaaatatttattattaatgaaaagtgaaggaggtacaacaaaatgatattccaatgatttaacacaaatttcatttgaattaatttcattaatattattaatattattatcatcaaatatattaattaaactattataagtaatataataagaataagaacctggtttataaatatcgatatcaaccattacatctttataaacagaactttcgatatcaattgaatggtatttatctctttgaaatttatcattataatttttaacaacatttgtccaaattttaccattattacaaatttttgaacctgaaactatataaaatcttaaagtaaataatggttgattattattattattattattattaatattttgatcaggtggacaagcggggaaagttaaaacaccacccgaaatattagaaatcaatggtttaccagtatcatttaaacgtaaaagtacaattttagtcattttaatgaagtgggcaaaaattgattattgacggataatttaaaatgtgggaaaaatatggggtaaatgtatagtaattgaagtgattggataattttagataaataaaaagtgaatgattatgagttgtatatgtgtataactacaattatagtgttgaatgaatgtaattgagtttagtaaatgaagaaatagaagaaacaactgataaagaaggaataatttaatgaaagtgtaatcaggacatgctcatcaaaaaaaggaaaaactctattgtttaatatatggagttaatggattattattacatgtggttgctataatggtatatgagtggcttggttttaatagttattatctttatattctgtattgtattgtattgtatgatagtattagtataatatagtgatagtatcataagaatcctttacagtactttactgtagtatctaattaataatgatggtgattacgtaagtagtagagagtatatcatattgataataatataataagataatataatagattaaaattgatatataatgactatacattatacaaagcgtagcaaaaaagtaatgttctaaatagtaatataattaagactaggattaagattaaaatttcattgtcttattcttcttctttgaagcaactttctttttataatttgaagctctagaatttctccaaccatgagttttaactttaactaattcttcaactggaatatctaatggattagtagtagtacttgtactattattttctttatttaattgttcttgctttaataaattttccttttgcttttcagctaatcttaaagttctctcttgagcagctttaaaataatctgaatttggattaaaacatttagctttctttgtaacttttttggatttagatcttaatgaatgtgccattgggataagttgtgtggattactcaaatgtaaatgaaactaatgaagtatcttaatcttaaataaagtgaaaaaaaaattttttcctaaataaataatattactaaaaaaattcttataataaccctgtcacgtgcagcacacgtgctattaaaaagggctacacgcggtgcgcagggtgttgcttattacgtaatagaggaaaggaaatgaaaaaaaaaaaaaaataaagaaacaatttactaataaacagtcacaataaattaagaaaaaaaaagtgagaaattttccccatcactatcccccaccaatcccctctgtacgctcccccactgccacagtgattttcctccattaaaatattttcctccacccttgggtcttactatcaaattatctcaatattcaatattattctttattttatattactgttctaatattataattattatattacctatttttacttactttctagcacaacaagtattcaaagatgtacgtataatactataactatcgtcatatcatataatatcaatcatatcatacactctacaagttgaaaattccaaattagccactcatttatttatttatttaaaaaattagttgaaaaaaaaatcatagagagaaattttttctaattattaattaataatcactttagataatacacttttctattaaaactattcaaataatatactacaatgtatgtattgtgatataatatgatatgacaaataattctatattagaatacaaaatactaacatactttacttatctatctattacagggctaacctccgtttacaaaaaagacttgctgcatcagttttaggttgtggtgaaagaaaaatctggttagatccagctgagacaactgaacttgctcaagcaaattcaagagcttcaattagaaaattatacaagaatggtacaattgttaaaaaaccaacaactgttcattcaagatctcatgcaagagctttagctgaatcaaagagaggtggtagacatatgggttatggtaaaagaaaaggtaccgctaatgcaagaatgtcaactcaagttttatggatgagaagattaagagttttaagaagattgttagctaaatatagagcagctggtaaaattgatagacatttataccatgctttatataaaaatgctaagggtaatagttttaaacataaaagagctttagttgaacatgttattcaagcaaaggctgaagctttaagagaaaaagcattaaaggaagaagctgaagcaagaagaattagaaataaagctgcaagagaaagaagagctgcaagattagctgaaaagagagatgctttacttaaccaagaataaattaactatacttaatttaatttaattaattaacttcttatatatattttatatttaagtatctatttttactacatgtaatttcttttcattatcataaataatattttaatctctaaataaaattatccatccctccctcactactttctttttacaaatgagtgtatattcagtaagagacaacaatattagtgatgaaagttcaaatattgatttagaggcattagatagtgatgatttaatttcaaataatttatcaataaatgattcaataaattcatcatattcaaatccattcaatacaacaataactgctgaccaagctattaataataacaataatataactaaccctccaataaatcatataaatacatatcaaagttcaaatttacaatcaattaagagacgtacaactacaaatgattcaaatattaatgataattattcaattaatgatataaatgcattagatgataataatgattattattcagatgatgttacatctacagatgatgacgacgattataatcaagatcttgtaagtaatgtaggtattgatgatgataatgaaagttataaaaatcttaataataaacaatttaataataaaattggtgataaattgaaaactacatggcaaaattgtaaaaatgatgaaattgaatataaggaatcacaaataattgatgaagtttccaaattacaaaatttaaattttttttcaaataaatatattgaaaatttagaaaatttgaaaatttcacaattaggtttattaattgaaatggttaaattaactgataattcatttgatgaattttataatatttggaataattttaatgaaaaatttattaatgatgatagtaaaggtaatgataattcagaaaaggttgataatgatataaattctaaaaattctaaaaattctacaaaggaaagtaaagataatgaagaaaataaagaaaataaagaaagcaatgaaacaaataataattctaatattgaagataatattgataataataatgatgatgactatcaaaaggaaatggaaatggtaacttggtttaatattaatgaaagtgaaggttttaaattaatggaacaacgtaaattagaaattcttaatgatttagataaaataaataattcaattgaattaattgattcatcaacaaaatcaatttggtcaaaatattgaatttattcatgtactttttcgttatttacattttatacccatatcttttcttaccaagtaaataactatcctcttcattatttatattaatattatcttcactatcaagtaatttatcatcaatttggaaatatttagttattggtgatacatcctttaaatgatttgtactataattattatttataagtgttatattagttggtaataattcattattagttataatatcattattattatttattatttcattatcattgatgttattattaatatgatcattattaataaaatttattattggcattgaataatttctatcattataataataattattataatatgaattaccattataataattatttaaatattgattattcgaactatattgatcaataggtactgaacttctctttgtagttggtggtgttataatattttcatatgatattcgatcatttaatgaaaataaactattactcttattcatactttctccaattatactttcatttttatcttcatctttttctttatctttatcaattattgaattaattttcgtaaatgttgtaattgcttgtgattgattatcaactttattaaatctccaaataagtatacatctaacatcatttaaatttaaattatcaatattaatattattaccatcattataattattttcaccacaatatattataaattgttgaatttttaaaggttgaatctctaattcaattgatttttcttgaagtttaattaattgaggatcattaccattataaatcatttccctcctctttgttgaaagataatttttccaataatttgtaccaattttagaatttataattaattcattctttttatttttactaattgaagaatttaaaatttcaaaattttcttgaattaaaactttcttcgatgttataattgtcagtataccatatttattatcctctttcattaattcattaaaacttaatttaattgaaaaattataataaccatttaataaatttttcgttattggtggtaaaaacattgaagattttgcatgaattattggaatctttaaattatctagaccatttttctctttaattaataatttataagtttcaggatatttagcattcaataaatctttatcaattgaaatttcatttatttcatcaaataataaacttggaggtgataatgttgaaaacatatgagaatcatcaattaatttaaaatttatataaaccatttcaaatttcttaatattgaccctaattggtggttgattagtattcataatgacattatcattattattaattaatttatttatttccttcctttgattttccatttgatttttagtttcaagatttttaaagtccccagataataatttaggtggtaatgatttaacaattttagtaaatatattagtaaaattttcacatatttcttcagtctccccaggaccatttaacattaaatttagtatatcattattaaaactattatctttgttattgttattgttattactatcatctttattatttttagtaattgcttgaatatgagaagttatttgacctatatttctaattgaaccagttttataataaatatagaataatatatatctactcctaccatgttttgaaccacaaattgtaatatttttaattgattgttttggtataattgaagcagcttcctcaaaggcattttcaacttcaattggccatttagaagttttacgacgtttaataactggactgtctgttacaaactcatcaaagggtgagtgagaggagttattaacactcattgccaaaagaaatgctaacaaaaaggttaataaaaagaaatcaacagggccaagccagaaaagatagagaaaaccaatgccccccgaccctaaattaaattctcgtcaggtaccaacagttttctcccaaattattactatttcaggaaccagctaattccgcactttattacgtcactttgggttatctatttctatctttatacactttacttactttatttactcttcatcagaggatgattggaggtattccgcatagtcctctgctgaggcaaaggttggcaatgatgagaacttaactctcttgttattactactgttatcgtcattctttctctttttatcgttctttccatcatctttttcatattcggattcttcactgccgtaaacatcagattcatcatcttccattaatactttaacatcctctccatctgatgataattcaccattattatcagtcttggatttggatttggatttagatttcttttctttcttagtcttaggtttttcttcaacttcttcttcctcggagttaaattcttcatccataccttcaagtgttcttaatttaacaggtccatcttcatcagattcttcctctgaatcagcttcactaccctcatcatcttcatctccatcatcttcaacatcttcaataacttcttcatctccctcatcttcttcatcatcagatatatcagacatacttaaatcagataaatcatcatcataattatcttcatcaccttcaacatcaggattacttgtaactaatgcattccaaactgtatcatcatctaattcactatcctcatcttcatcttcacctctctttgctctttcattcatttctttatcaaattttgaacgcattaatttatcttgttttgtactaaaatattgatagaaaaattcatcttcaggtttaatttgatttgcctttttagaaagccaatcctctgtattggctggtatatcagtattttcaataccagttgcacgaactaataaattacctgtatgtaaaccacctaatggttgcataattgatgaaccttttaaatttgccttacttttagctttcttataaacaaatctatcaaggaaatgtgataatgtatataatcctaaatcaggtttggtaattaatttcttttcatttttactcatttcatcaaatttcataaaattttctgcgtatgatctaacagttggatgataatgattaataaaatattgaatttcccaaattgatgatttatctgcattagcaaattttggatctctctttttagaatcataaactttattagaattctccttttctttaatttcatcaagtgattcctcttgttcaatttttttcaataattcttcatccattggtgtattaataaataaatttctaatttctggaatttctctctctagttgaattaaaaggaaaatcatacctgaaattgtaccaatattaagccaattaagacaaacttgtgatattctcttaacaaatgctaaaactcttgaagaattatcatcatcctttaatgatttatataataaatttaaataaataccttgcttggaggaatttaataatctttcatcccataatgattcatataatgttctaaaaaatctatccttatgtaaattatctgaaaatttatttgtaattgtttgaattaaaattaatgcttgaactgatgtattaaaatttaaactatgagttattttataaagaatattcaaatgattttcaaatatatccattgggaaattagagaatgggaaagcacgatttaatcctgttaaaattgctgcaaacattttactatttttctcttcaacaatatcattttcatctttctcatttttaacacttttaccaccttttttacctcttttaactttttgctttcttctaccttccttttgatgttcagtttccttaaatttaccaatattttcattatcagttttaattaataatttttcaaataatgcaaaatatgcatcaactaatttatttgctaatttttcatccttatttgttaaaattgtttgatttaatgtattaattgaataatataatgcatgatgttcattatttgatctgaaaacaatatcaattacactttcacaaataatttgtttcattgcaggatgttcttgttctaataataaaatttgatatgatgttttagatgaaactttattatcaatatcacctaatttattaacacctaatcttaataaatttgcttcttgttcaggttttgcctttaataatgagaatatatgtgaaacaattttcattctaacatataaaattgaatcatgtgataatttttctaacattgtaataaaattaaaatataatgattttaaatgatcttcaaaatacattaaaattaattgttcatttgataaatttttacttaatggttgtttcttaaaagattttaattttctatcacttggtaaaattgtactaactaataaatctgttaatgcatcaacacattgcattgcagcagttcttgactttttttgacacatattaaataaattatctaatgctcttaaattatgtaatggagcttcttgaactaataatgttaatgcagaaattttatctgataatgtaccacctgttaaaatttgtgaaaggaatcgtttttgtgatgatgatttattaaattcttcatcataaattttattatcttcttcaattaatcttttagccttttcatataattcatcaatatcttgttgttttaaatatctatcaggtgtaatattttctaaatttaatggaatattataccaatcatttcttggttgaactgtaagtctatcagagataactgtttgtaaatttacaatcttgtctggatttttggatttaacttttgtttcttcttctttggaattgctcgcagtttcttcttcagattcagatgattctacctcttcctcggattcttctgctgcttcttctttttcagattcttcctcatcttcctcatcatcatcttcctcctcctcatcctcttcttcttcttcagaaactaattcaggtgtaacttcatcatcttcaatttcaacatctttaacagtatgaccttttaaaccaatttctttcataaaatcagttaattcattagttaattttgaatcaattttaatattattattatcatcatcaaattcttgttcactaagttcatcatcatcagcatttaattcttcaacaagttttaaatcttcatcagttgcacctaattctaatgcttcacgacgtaaaatttcattatttacagattgttctttacctttagatttagattttttatcattctttgaattctttttatcttgctttttctgttttttttcatccttaccaactaatgcattggtaactttatctttcaaagatgctaaattcaatctagccccttccattgtatatatcaaaggtaattgattgttcctagtgtgtatagaaagaaaatatatttttcagaaataataatctttaataaaaaaaaattttttttaacctactgaaaatttcatgtcaataatctttaataaaaaaatttaccagcttaaaaaggaaaaaaatataataagctccctccggccgggatcgaaccagcgacctcaagatgtcttgtatgctgtttaagcctattacagtctcgcgctcttccaactgagctacagaggggttgttatgtatgtttaaaggtgttgacatgctcgtaattgtctgtgcacgtgactgtttttattttaagggatttattactaattctgcttgttaattgtgtggtttaaaattacaaaaccataattatgatttttggctatcgattaaaattattaaattgctggaaaacgtatctttgtttttaatgaattttacaaattctatacaatgtaatttttttttaaaatcaccaatcaaaacaaagatttttccaaaatattgaaaacgatcacagttaaaagcttccaaaaccattgaaaacactagatatgtactacaatactatcattttatcaatacaattgaagaaacagcaaaaaaattacacttcacattcccccaataccccaattcattttgaaaaaaaacattttgagaaaagtgcccttttctcgcatattctgaaaattattaaacagaacataatcgcatctcgggtactgccattaatgcctattatggctaaaatctgactatctaataattatattcgagtcatttatatacactatataatatgtaccacatggcattaatgtctacggaaacatattattaataacattaaagttttcaaaattgaataatatcccttcttgttaattaagtggtgttttcatttttgagaaatcatataattggtccctcctcctgcgaagtgagtgcttgatgtattatattaatatatatcaaaatagttaatcacaattttaatctgattgattttccattttatattcttcttaatcaaaaatgccactgtttggtaaatcagttgtatttgatgttgaattattagatgccccaccacataatagatattcagtaataaatccaattattaatggaattttacatttaaaatttaaggaaaatgttaaaagaattaataaaattttattaatttttagtggtagaatttatattagatatgatgcattttataaaattgatccaaagactaaagtaaatgaaaaaatatctaaaaccaaagtattcgatagatatcatttatttgaaattaatttaaatcttgaaataccaaataaaaaatcatcaaataatgaatattcatttaattcaggtgaaaaaattgattgtaaatttcaagttgaatttccccaaaataaagtattaccttcaacagtatgttgttttgatgatgatgattatggtgatatattagcacattatgatcttgattttaaaattgaaaggcaaggttctcatgataattctaaaacttatgcatcttatagaaaacctatacaatttcaatcaggcgttaattttactgaacttaatgacattaaaattttagaatatcataataatattttaattaaaaataaaattaaaaaatttagttatgatgaaaggtcaaaagctttaatacctacatcaataaataatccacatttgaaaactaaaaatcttagacaattatgggatgatagatataaaactaataatttaacggattcaatgagtacaattccattaactgtatcatttgcaattccaaaaattttagatttgaaaacatcatttgtaaatcaaatacaaatttcaattagttctaatttattagaaaatggttttaattcaaatgatagcgtagaatttaaattaaatggacaaagtactaaattaggatattttgaaattaagaagttgaaaattagattaaattataaaacaaagattatcacagataaaggattattagttttagtatctggaacttttgtattatcaaaaattgattttaacaatttaaattttgatatttgtgattttacagaagatactaaaggtaattataaatttgatttaacaagtgaaatgttaagtaatcatacagatacagatattaataaaccattatatcaattctcagatgaaactttatgttgtccagatgatagatttttagaattaaattatggtacttcaacattatcatttaaattaacaattgatgatggtatgggtaagacatatgattatagatttgaaacattctccacccctggatttttaatgaataagaggatgttaggagagagttataatgataatgcaccaccaccaatgtacagtgaataaataatcttatcttcactattacccaataaggaatgttctttccaccctcgctcttaaattaatgacgttacgcggtaccttattgtctttaattatattatttatttattgtgcacatgtctttatttattgtcttgagttgttgatcaaattgatgattgtaatgaatcagtgactataacttaattgcacgttcctttttgtaaatccttctttttgtatatccttctttttgtatatcttatttatttgatcttatatcctctttattgtcgtttcattaatcataattagattatatatcaatctccacagacaatgttcacaagttcaattaaatacaatataactctttcaaatccaccaaataattttaaatattcaccagctaataataaagtttcaggtacaataaacatagaatttaaagatactgttaaatttattaaatcaattaattattcattagttggtacagctgaaataacttatttttcaactcatttaattaagaataaaaatgcacctgattcacttaaaccacataaatcattaatttcacaaaatttccccttttatgttaaaacaaagaaggctgatttagataagtatttacaatttcaatttaatccgaaaactaaaacttattcatattatactgatcaaaagttgaaaattcaattcgaacatgaattcccaaatgatatgtttttaccaagttcatgttctaaaattggtaataaaaataagggggaattttcaatttattatgatattaaagttgaaataattcaaaaaaaatcaggatttttatcaacagagaaagttttaagtaaatgtaagataccattgatttatcaatcacgtttagattataatattgaaacaaatataaaggataaacatgattattcaattttttcaaaatctgatctcttccaagaaaaagaaaaggcattctattattcaagtgaaaataaatctttaatacccgtttctaagagaaagaatagtatattcagcaaaagtagttctaagtcaaatggatatgaatcaccaacaaggtcagttccattatctattgaagtgcaaaccaaacctgaacatgatatgtctaaatcatttattgaacaatttaatttaaaactagtttctgatttaaaaaattttgatactaataataataaatcaaaggaattccaatttaatgatcaaagtacaaaacttggattatttaaaatactttcattaacattagaagttagaaataaaattacaattcaatatgataatttaattgttaaagatacaatatatacaccaattatgaatataccattcaaggaattattctttgatattaaagatttccaatatgataaaaagaaaaaatattattttatgaatattgataatgataaattattaaaacattgtgaaattaatttaaaaacttcattattagatttattatattctaaaactatattaacaactggatttacacctgcatggtttggtaatatttcaagtttaacatttaattggagtatttgtgatgcaaataatgaatcaactgttataaattataatattaatacattatcaacatttaacttcccattagattatcaatctaaaagggcagaattaaaggaagaaattgttgaaaaggaaaaacttgaaaggaaactatccaattcatctactaaatcatgggaaaccatttcatcattaaataaaacctcaatgaataaaccaaaaacaaagaataaaaccaaaacaaccaccaccacaaccacaagtacagcaaatactactacaacaacaaacacaactacaactaatatcagcaactttacaacaaatttatcaaataaagaacttcaaaatattcaacctttcattgaacaaataactaaaactgtcacacctggtaaaaatccaattaataatgaagaagtggaagaagcaaagaaacaaatatttaataaaatcgatgatttatttaaaatgattaataattctccacaatataatgaaaatgtaacttatcaaaacaatccaaatactgagagatattcacctgaaatggaaacacatgtgggagatgaaactgaagaagttatgctaccaccaccttcctacgaagagagtgaaacacagtatttgcaatttataaataaatgaatgactaaataatgaaaatgtataatgaaaatgtataataaaaatgatcaacattagaaggcttagcttatctaagggattaccctcttggggaattaccgaaacccacatgttctattaatttattatttattatttattctctatagccacttatctttcggtactttcttatttccaattctttataaataccatccatgatccgccacacggatgtcatctaccttaactttataacacaacgacagctacacaatgacaaaagttgactatgaaataacatattcaaatccaccaaattttaagaaatattcaccaatgcataatagagtttcaggtactttacgtatgattttcaatcaaccagctgattatattcaatttcttgattattcaattgtcactacagtacaaatttgttattttgaaattatagaaagaatgggtgttaaatcaaagaatcgtatacaaaaggaatctgttatttatgtaaagaataaaaggatgaatcttgatgatgttttaccaaataaatttaattcaagggataataatttatgtttttcttttttcattgattttaatgataatatgaacagtataggtaactttttaccaagttcatgtcttaattatggtaatatggagactgcactagtttcagtaattcatgaagttagagttcatgttgttcaatttaggaatggaattgaatatatttatgatagatgtgtaattccattattttatcaagcgggtatagatgatagattaagagatgagaacaataaaaatgttttaactacatctgattcacaattatttgacaaaaaggaaagagaatattatttttctgaagaaacaggtaaactaacttcaattgcaaagaagaatagtttattctttagaaaaagagaaaatgctcatcgttatgatttatttacaaaatcaattccattaagtgtaagtatgaaaagtaatgaaataattgatattaccaaaccatttattaatcaatttactttgactttatcatcagatttgaaaactcaaatgatgtataataatcaaacaaatgatttccaatataataataaaagtacaaaacttggattatttaaaataaaatcattacaattagaacaaaaaaatcaaatattaattgatgggaaaattaatgatacagtatatacgccgttattgaatatacaatttaatgaattttatttagatattaaagatttcatatatgataaatcaaatgatatttacaaattaaatatttcaagtaatgatttattaaaacattcaaaattaaatttaaaatattcattatttgatttaatgggtggtaaagttgtaatgacaaatggaattacaaatatttttgaaaataaaacaacagtttcatttaattggacaataagtgatggtattaatgatggtaatatgagaatttatcatttggaaacaaattcaacatttgatctccctgatatgtatcataattataatcctaaatcaagggatagtttacaagaagtttctgagaaaaaggccatggaaaaggaatttgagtactcatcacaatcatttccaccacctccaccatcatatgaagaaagtgaaggcccttactacgatatcaaagagaaatcataatgaagtagagttttgaactgggaaaagcccgataagaaaagactgggggaaaattcgtggggtggccgactcagccttgttgataaaagattcgacattattaatcgttgataattgtttgtttgtttgtttgtttgtatatcttctttttcctttgttttctttctataagtatctatctatatagtcaattaaataaatgagtaagtggtttgggaaacaggcagagatatttgttgatattactgatccacctgttaattataaatattcaccaatttattcaaatattaagggtaaagtattcattaattttattgaaacattgaaaaaagtaagtcatattagatgtggtattgcaggtacagctgatatattatattatgcaaccgatttacaatatggagcatttcaaagtactgcaattaatagacaactaattactcaaagtattaatttttataatattcataatgatttgcctcttgattgtaaagattgttgtaatgagaaagaaaatggtggtaataataataataataatggtacaacaccatcatttacatttgaagagggggagaagattaattataattttgaatttaaattcccagattgtttatttttaccaagttcatgtaaaaattttggtaatattgatggtgatataactgttacatatgaaatatttgttgaaatttatagatttggaggattaaagaataaaccgaaaagatatttactttataaagtaccaattggatggcaatcaggagttgatccaaatttatccaagacaattactacattaagttatcttaaaattgatattttcaaggataaacttaaaaaattttattatgatgaaacaactaatgcattaattccaacatcaattaataaatcacattcatcaactaaatttataaggaaactttggaataatgattataaaagtgagaattattctaattttaccaaaagtataccattaggtatggatttttctattagatcaataattgaattatctgaaccatttagtagtcaaatatcattaaaatttaatgttgatttgaaaagtattggaataatggataataaaggtaaagaatttgtatttaatggacaaagtactaaattaggtaattttcaaattgaatcattattaattgagacaaataatagtttttcattacaatgtaatcaatattatatgaaagaacagagtaagaataggataattaagataaattttaaggaattaaatatggatattaaagatttccaatataataaaatgaatgaaattttccaatatgaattaccaattgaagaaatttccaataaggcagatattgatataaatcaatcattaatggatataatgggagataattcaattatgtgttcaggatttgttcctaattggtttggtaatgttgttaattttataattacatggacaattagtgatggatatagtcaaagaaggaaatatgaatttattactaaatctatgccagatttcttattaggaatggacgatactcataataataatatagaaccagatgaagcaccacccgtctatgaagatattgaacaagatatgaagatatgaagatataagaagaaaaccgtcactaaccgatacttaccgatattaaccgataaccgtttaagagaagatagcgaatgtgaaatttcggaaagaggaagagggcatagactggattctccgaaaatgccttttacactgaaatataaggcactgttacggttagaatattaagagttgataaaggtatatataagatcaaaggtatatcctcttttctcttgatttccatttctgctattcatatctgctattcatttactacaattttaattacactttactaaacaataacaaaataatacacacactatggctcctgtaagtattgaaactacaaaatctacatatactcttccaatttctgaatatatctttcgtagaattgaatctttagatattcataatatctttggtgttccaggtgattataacctttcaatgcttgaacatttatattctgttccaaatttaaattgggttggttgttgtaatgaattaaattcttcttatgcagctgatggttattcacgtacaattggttcaaataaatttggtgttttattaacaactcaaggtgttggtgaaatgagtgctcttaatggtatttgtggttcatttgctgaacatgttccaattttacatttaattggtacaactccttattcatctaaattaaatggtaatcattatcatcatatgattaatgctgtttcaactagagatccaactgatcattatgtttatgaaaatatggctaaaagtgtttcatgtaaaattgtttcattaactaatgatttatcaaatgctgcaaatgaaattgatgatttatttagaactattattttaactaaaaaaccaggttatttatatgttccttgtgatattgttaataatttaattgatggttcaaatttaattgaaatttcaggttcaaaattaattcaaagatctttaccttcaactaatgatgaaattaatttaattaatgaaatttcaattaaaattttaaataaattaattaattctaaaaatccagttattttatgtgatgttttaactgatagatatggtttaactgaaattgttcaaaaaattgttaatttagttaaattaccttcatgtaattctcatatgggtaaatctttattagatgaatcaaatccttattatattggtgattataatggtgatgaatcaaataaaatggttaaaacatatgttcaaaattcagattgtttaattcatattggtgattattataatgaaattaatagtggtcattggactttatataataatattaatgaaaattcaattattaaattaaatcctgaatatattaaaattggttcattagaaaatttccaaaatatttcatttgaagatattttaccaaatttattattaaaaattgaatcattaaataaatcaaatcaattaccaatttatcaaatacctaaaattattaataaaattgaacaaataccttcaaatactccaatttcacaaactaaaatgttagaaaaatttcaatcattttttaaaccaaatgatgttattgttactgaaacttgttcattaatgtttggattacctgatattaaattaccttcaaattctaaagttattggacaacattattatctttcaattggtatggcattaccatgttcatttggtgttagtattgcattaactgaattgggtaaattagattcaagattaattttaattgaaggtgatggtgcagctcaaatgacaattcaagaattaagtaattttaatagagaaaatattattaaaccattagttattttattaaataataatggttatacagttgaaagaattattaaaggtccaaatagggattataatgatattagaccaaattggaaatggactaatattttccaaacttttggttgtaaagattctaaaactgcaattgttaatacacctgaagaattagattataaattagaggaatttggtaatgatttatcagttccaagattagttgaagttacattagataaacttgatgttccatggagattccataaaatggttggtaattaattaaaattagattaataaacttaactaacttttttgtataataaataagattctatagagataatataatatataatataatatgaaaaaattacatatgataatcaataaaatcattaactgttaatttaacaaaatcatccatttcaacaagtacaaattctttaaaaaatttatcatttaaaacactacttaaaaatcttttaaattctgttaataataaatctttcctacgaatacctttatttgtttcaattaaatcttctggtcctctaattgataaataaagtgatgaaactaaaattaatttaataaatctttgtgaacctaatgtacttatatgtgataataattcatcattttcatttaattctgttgaaattgttgatttattttctgatttattactaataattgaatttcttcttgatttaatattttcattttcattattatcattattgattattaaatcttttaaaatttctaaatttgttgatgatatagataattgatttaattttttcaaaaatttattattagaattattgttacttttaaataaattaattccataagattttgtaaatgattcatcacctcttttttcaataaataaatcaattaaaaaataatttaatccattaatttcatttctattaatttttaaaattgaatttaaaattttgaaaatttgtaaaagtaagaatttatttaattgccaactttcacttgatgtaccatcaatcattttatctaatatactaattaaataatgagtatctaatctaataaaaatttcattatcatcatcagaacctccattccaagagaataaaaatccaggaataatgttagagtttgtgttttggaaaatattagaattataattaattgatgttgataataatgataaatttgataaaacaattttagtataataaattaaaatttttgaatcatttaaataagcaaactgtgaattaaatggataattaagtgggaatggttgaattatattattttctttaataaattttttaatttcataatcattatcatttccaggaattgatttaaaatcatttattttaaggaaattaataaaatgataaaatgaaggtaatatctttgttgttaaattacgtaaataatttgtaattaaaatgaataaagtttcatcattatgattatttttaattaatttattaatttgtaaaattaatgcattatcaattcttggaattgatgaaaaatttgttgttattggtgtgtggtgaacattagatgaatttttaattgtataattattaataattttagggaaacatgaaggattccaattatttaatcttaaatcaggttttaatgaatcaattttagaaatatttgaaaaagaagttgaaggtgtcattaaaaatgatgaataatttgaattaattgaaggatctaatgtatttatattggtattatcgatatcacattgaacattaagagtatttgaatcaaaatttaagaaaatattccaatctaatttacttataatttgatgatttgatgtaccaattaaataatttttttgagaatttaataaatttaaattatttaaatcaattattggataaaatgttaaatcattggatagtaaagaatttgatgaattgaaaatgaggtataatattataatataatcatttaaattattataacatgatttatttgcaaagaatatgattttttttttcaatataagagcatttaataaaatatttaatggatttatattttcataaggggttattgaagtttccataaatgttaaaccattaatgttaatattaatattattaaggaaatttatgaaatttttcaaatttgaagaattttgtaaatctataccaaataatgataaatttgatgaaattaatgataattttggtatattaattgggaaattaattggatttaagttgattgaagttttaaataaattatcagtatcaatgaatgtatcatttaattgggatggtagctttaatgaatcgtttaattttgtatcaggttgaattctactaagtacgaatcttgaaggtgaatttattttttgataatgattgaatagagtatcaattttagaattatttaaattatgataaattttattgagattgatgttattaataaatgaatcatgtaataaataaactaaaaatggtttaaatattgttaataatggtaattgagatataattgaaataccttttgcaatattattattattatcataataactaattgtataaatataacaagtacaaatatttaattcttctttatgattgatggataaattaccatttgaaatattaattgaaattggtataaatgtataatgttcaatattaggataattaaataaattaattggaataaggatatctaataaattatctaattgaatatcaattgaatcagtatcattaagattaaattttgttaaagtatttaaaattttaatccttgaaattgggttaatatcaaatgtaaataaataatcaattactgacattatggtatggtgatatgaagggatgaaaggggataaggggtatgaatggtataaagggtatattatgagttatatatagtgttaatatataatataatgtagtattggtagataattatttctaaataaagaacaataaatcaatataatataaattaaagataaagatgagatattgcataaaagtacctgaaaaaaggttattaaataaaattaaggtattatttatttagtaattttaaccaataagagagttatttacattattaatcataaaattattattccaactagttactttattaaaatcaaacagttatcatcaacattaatcattaatcaaccatcagatcggtaataaacggtttgaaaaggagatcttaatataatttatatttatatgtttgcgtcgatgggactatggtcttggagacggtgcgtcgatttgattttcttaaatttcttcagttttcttctgtttcttcaatatttcccactttcgccacttttccatttaatttgccaccctggacaataccactttcttttgaatatactataatcaatcacacattcacacattcacacacatttatcctacaatacacaatgtctgctttagatcaatcattagatgctattatctctcaaaataataaatcttcaagaaaaaatactcctgcaagaagaacaattaaaggttcaaagagacctcaaatttcttcaaaatctgctcgtggtggtagagttgctttaaataatggtagatcaattagaccaactggtcctgcttctttccgtggtagaccaattattaatcaaagaagggcaattcttacttcaaatattcctgctaaaattaatcctcaagctgcttccttgaaaaatgcttcaaaagtggttgtatctggtttaccaaaagatattaaacaagattcaattagagtatgttattattaactttcaattttttttctttcactttatttcatttcatttcatttccattgttattatattatcattttattttatttgggttttatgttgctgttggttatgtatggttttaagtttatatgggttttatgggttatatgggttataggtatatattggctttatgtctttaatggtttcttatcaattgcatagacttgattaaccttaatagtctatgctcattacttgattattttatcaagtacttagttcaaaagttctagtcactagttctattcattttaaaggaatttattcatttctttgatatcttattcaatcatcaaattttatgatgtctcctctaacaaatggtcaagttaattctatgttactatttgctttgttaatgatgatacttatttttatcattttattagaactataattataattataattataattatattttttcattcagttttgcttattctgattcttaattcagttcatctgaaatcaattttgattaagataaaattgtgggattttatcattcaagaataaaataagaataacaattaaaaatattccctgaaaaggaactttttttgaggataaatgtgtgtgatttattgataagactgaattacaaaaaaaaaatataatttaatataatataattaatagaatgaactatactattatgaactaaactatactagcctttactaatgaatgctttactataccttaccattaatgcctacataacaataaatgataattaatacataatgaaaatttaatgaaaaaattattatgaaatgaaatgaaattcaattttatttcgcttttttcattttgatacaaatttactaacttattatcttcaaccccctctcatttattttaggaattctttcaacaagctgttggtccagttgaaaaaattacaattgcatttaatgaaaatggtaaatcaactggtgttgcaactgttatttttaaacaatcatcagctgcacaaaaggcagttcaaaaatttaataatgcagcaattgatggtggtcgttcaaaattaaaattagaattagttgttgatacaactaatgttccacttgcagctagaattcaaccaaatattattccaactgtaagaactaatgcattaaagggtagattaacaagacctgttagaaataatagacctgttaaacctacaagatctgcaattaaaacaagacctgcaaataagaaacctccaccaaagaagaagaaaactattgcagaattagatcaagaaatgactgattattttgcaaataataattaattgatttaattattattattacttttgtattttgtattttactctctttgtttatgtataagtaataaaaaagaaattataagctattattaagtactatatattatatacaagtggtatttagacattgaagaaattaaactatttcttcttttcattatcatcatttgaataatctgtaaagaaatgactccaagtaaatttatcaccagttcttcttgatctataacttaaacctgcaccttcatattcactctttctttgaaatctttcaactccatcatctaatgggaaaccaggtttaacagttgaaattgattcaccacttctctctctaactctttcttgcattaaactatcatatgatgatgcctctttaacaaattgtttcttacgacgaattgtaacattttgtttaacaaaatatgcacttgtcattgcaactgcacataagaaaactgcttgtttccaaaatgatttaattgatgggaatgatgatgtcggtggttgcattttgtcaaatgaaagtagtagttaatagaaattatttaattaaaaatcgaaaattttgcgaatttgttaaattttcatgtcatggttatattatttaaggacttttgcttttacaggtgtattatagtatagtatttaagtacatcaaataagtcagtaatatgtatactatttcaatgtacctacattctattactaccagcatctactattctacaaatccctttgactgttggtgaaagacgtataatgattacccgaataggtaactaaaagcgtagcggttaaattatttccaattttctttatcgtaacatgtttttattttaaaaattaaacttttgtttatctttttcttatcttttctcttctttttctctttttagacaacaatgacagacaagagtattatacatgcaatatctggtggattatcaggcttagtttcaatggcattaacttatccattagttacattaagtactaatgcacaaactaaaaatattgaaaataacaataacaataataatgaagaaattaaaaaattaacaaatgattcaaaactttcattacgtaccttacatcatgaaatttcacaagaatttggtaattataaagaaaatactaatgattcaataattaaaattaaattaattaaattacaaattattttaaaaaaattattattacgttttaaatttattttatcatattgtaaaaaatattattcaggtttagagagtgcattagttggtattgttgcagttaattttgtttattattatatttataatttaattggtaattatcttaaaagaggatcaaagaatagtttaaatatttcaaatagtttaattacaggattatctgcaggtattgtatcaagagttataactaatccaatttgggttgcaaatactagaatgactgttaacaaagattcaagttcaagtacattaaaagttatttataatatttatcaaaatgagggaattaatggattattatcaggtttaggacctgcattaattttagttacatcaccaatgattcaatttacaatttatgaacaattgaaaaatttattaattaaatttaaaagagttaaaggtttaaataaaatttcatcaattgatgcattattattaggatcatttggtaaattaattgcaattttaattacttatccatattatacaattcgtgcaagaatgcatatgaaaaaaattgaagataataatgataatagttttaaattattttataaaattattaaaaatgaaggtattaattcattatataaaggaattgaatcaaaaattttacaaagtgttttaagtgcaggtttaatattttattttaaagaggaaatgatgtcttttgttgaattattaattaatcaaatcaataataagaacatcagtattaaaaagattacctctaaatctaagaatgtttttagaaaataaataaataaataaataagtgtgtctataaataattccttattcaattaattctttcattttttcataagcaataaacatcatacttgaagttggaattgatttaaataatgttataccaatacctgaataaaaacctaaaatacctttagttttataaatatgtttagcaattgatgtaaatgttaaattttttgaatcattagtttgtaaaattgatttaattgtatcagctgggaataaagtacaatgataaccaatacctgcacctgcacctgcaatcattaattgtaaaattgaaggtttaaaatttttttcaccatttgcaaaataattaattataaattcataattaccaaaccaagccattgaaccaccacattctcttaaaagagttgctgaatgtcccttatataaaccttttaaaccattatttcgtaaaatttcccttgtaatttgactaatattagcactactactattattattattattattattacttaaattttttaaattttcaacttgaaatttacatttaactaattcaattggtgttaaaacaaatgaagtacaaattccactaaatgcaccacaaattaatttttcacttattttcaattcatcagttaattttttattattaaataattttaataaatcttgtgataaattataactaaagaaaagacatgaaacttccattgatgcacctaaaattggtacttttaaacctttataaaaacctttaattataccttcattattataagttttcttaattgcatggaaagttgaattatataaaggatgtggtaatgattgagaatattgtagtctaactttaattgtatcgaatgggaattcaactaatttcccacatgcaccactaactgaacctaagaagatttcacgtaatgaatctctgaaaatatccctctccttattcatatatatagagagtgaataaaagaaagagatactgatactgattcttaaagataatgaaaaattccaacgtctaatttctttatctaatcaatttcttaaatgagtaatttatattattatgtcaaaataaccgcgggagggaaagtgttcggtcacgtgcccgtcacgtgtgtgtgcagagggcatctcctggtaaccctcgttactcttttaggcaactgctcacaacttcccatattattattattataataatattccgcatattctcatgaaaatttaatttaatttaattatttaatttttcaatttgatgataatagcatttacttgaaagttttcattttaatcttcctttttacaagggatagtctgctcattttaatagcttaaacgtgattattcaacaaacaatgaagtacttagctgcatatcttttattacaacaaggtggtaatgcatcaccatctgcttcagatattaaaactcttttagaatctgttggttcagaagttgaacaatcaaatattgatttattattatcttcattagaaggtaaatcaattgatgaattaattgctgaaggttcaactaaattagcttcaatttcaactggttcagcaggtgctgcttcatctggtgctgctgcttcaggttcatctgaagatgctgctgaagaagaagttgaagaagcaaaggaagaatctgatgatgatatgggtttcggtttattcgattaaattaattaatctagtattaacatttagatctatatacattttcatattttgtttttatagatatagtataataaaaataataatatattgatataaaataataatctttttactttactttactttactttactttttattatttattgcaagtagatacctcatacgttctatctcttgtttaatttcttcattattatcctcattaccatcattcttattatcaatcatatttcgtaatttacaaataatatgaaataaatctcttgaatctttattcactttttcatacttacttatattctttaaaaatttatctcgtatattatcatattcttcaattaattcaacatcactagtaccaattaaattagaatctggtaattcactatacatttttaatttatctgaagtaattatttcatcattatcatcatcatcataatcatatattccactttcaatataatccctacttataaatttattaacatcttcaatattctttaacttattctcctttatttccctctcatattgcattatttgtttaataacttgaaatctattctgtcttaaaaataatgtattcctatatttattcttaatctctttattaactttattcaatactctattaacatcttcttcacttaatttaatcccattatcctttaattctttaataaattcatcattatacttaatagatttaactaactttctctcttgttcaattataaactcattgatatcttcaaatgtactaggtattgttaaactcatatactatcttattcttaaacaaaaaaaaagtcctatagaaacttataaaaacacatgtaaataaacatgtcaaaccgcgtatatcattaattcaattccaaaccttattatctaaatcaaattcattactttcaatatcatcatattttaatccaaaataatcacaatcaacataatccatcccctgtgatccaaataatccatctctattattattaccaccaattttgaataaattactaacccatttcttaaaatgataaattatataattaattactctcttttgactaaattcattccttttgataaattgttcattcgttattatacttgtaaaactatccttatttcttaataacacttgtttagttagatcattcaaattatcatcatttgttaatttattaaatatttcatcaatggtatttgttgataattttgttgataattgtaattttgtcattgttatctaaatgtcttataaagaatcaaaaatcaaagaattataataatactaaacaaatctatttaaataactctttttaactttactttgtgacttatcacattactacacgtcatatttcttatattatattaataatttaaactaaagtacataaataaactatttatcagtaaatggtgcctttaatggatttataacagatccatatttagtaataacatttggtgtaataatcttttgatgtgtctttgttgttgtccattctttacccattggagctctaagtgatctctcatattcttcccatgtcttatatggatatggaactttatcagcttgatatttactaccttttttattaactctctcatttataataacattcttcttatttttatctaatctattatctttattaacaataccttgaatagttttaataatttttctctttttattattttttggtactgtccatccaccatcttcttcttcatctgctcctgcccatgaaccccaacctggtactgaaatatcaacttccttatctccatcatctttaataatttcttccttttcttgttcaaattcttcaattaatatatcatctcctgcaaatgcctcttgaattaaatcagattgtttaaacatacgaatatcttcttcattattaccatcactctcatattcatcatcagatttagctgctacattttcattatctttaattttctttggatcaataattttcaatgtttccttattagaaattgaaatttcttcattattaccatttaataaattatcttcttgttttattaatgattcttttctcttagataattttttagcaattttggcacttgatttatctaatttagatgatgatttatcaataactttaactttattagatttattacttttattatcttcatcactatcaaaattatcttcatcatcttcagctaaccatggattaacttcctcagattcttcatctggtttagaggaagaagttctaacatcaacattatcgtcatcatcctcattttcactttcatcttcatcttctctatgttttctctttttagattctctttcctttacagatattctatttttcaataatctagcatcatcttcatctaattcctttaaaagttcagattcaattttacgtgcctcttcagctgcaactaatgctgatggtgtataaattcttctaccattattaaaagttatattaacaccattattaatattatcttgattaaaatttaaaatatcagtataatcttcattattttcaaattttcttaaattttcaatttcctttaatctaattaatctatctctctcttctgcattcttcataaaatccattgctaaaacacctttaccaacttttgataatttatcattatctatattatcattgaacttttcaatatcattctctaaatcacttaaatctctttcatcttcactactttcattctcatttctacctaattgttttaattttaatttttcactttgtttcatcatttcctctaattcatctctattagatttatcttttgacatacctgatttaatcatttgctttgcccattgtgatgtatttttatgttttaatgtcattctctctttagcacgttgatacattggatcatcattattatcttcataatcttcatcttcaataccatttatttgatttgcttgagaaataagtgattgttcctttaatttttcttttctcatttgtcttctataagcttttgatttaatttttttcaatcttttagaatctttaacacctctatacattaattctctcattaatctaagttcatttgtacgtttcatcatttcagattttgataatttagcagtttcaatattttcaaataaatcttcagtttcttttgattctaaattacttgcatcaattatattatctaattttgattctaattcattaattaaaatattattatcatctttgaaaacattatttttatctaaatcaggtttttcgggtataaatttcaaaacatcttgatctctattatgagcaattatatctctccaacgattaacttgatctttttgaatttcatatgctgcacgacgttcatgacgtttttgaatattaacaggtaatggaattgcaaatgctgaattttcatcattattattaataatttcatcatcatcaaaattatttgattttgatttttcctttaattctttagaatgttttgcaatatcacgtattaatgattcattttgattattattattattctcattatcattatttccatcattttcatcaatatcttcaagcatatcatcaaatgtaagtgaatcaccttgggttggtaaaaggaattcattttctgcagttttatcattaattaataattttttagaagtatctttatcagtttttggtaattttgattttaaatttttcataactgaaccaagttgaacatcttcatcatcagataatttcatttcatcaaatggatcttcttcttctgattctgattctgattcttcatcttcacctgattcttcacctgattcactttctgattcttcacttgcatcattattatcatcaaagacaatatctttatctttatttttaattccattatcctttttatttaatgattttaattcggaatcatctctatcccaaagttcagaaagtgtcataagttcaccttcatcaacagattcccaaccatcttcatcttcaccatattgatttatttttttatcatttttaataactttattcttaccattcttaccattcttctttttaaccatataatcatctaaatcatcatcacttcctaaagcagcatctgaatctaattcttcatcatcaaattctaaatcatcatcttcttcattatcatcaacattacgacctgatttcttttttaaaaatctacttgcattaagaactgcatctctaaaatctggtttatctgatttttcagattctaattgtttagagaatttgccttttctattcccctttctctgtggttttgccattgtctatgtaaataaaaacagtatattaatataagtaacttttaaagaaactgataatttttcaaattaaaaattttttttccaaaaaaatatttcttagtggaatttccgagagattgggttttactatggggaaaattccgagaatgtacttatctattatggtttatatatcctagatctgtctttatacagatacatatatatatacgataataatagataggatactatattcaagtcaatcttataaacatagtgccttatccaatgaaaagaagagagagtgtggaatataaaagagaaagaaagaagattgagccacagttaccaataggaaatggtctctgagccctttaaaagtgagaggtttcccacatttttattattattatggttatcactgtttcttttaagtaaagattacaaatacaattgaataataaaatgacaggtatttcaaccaatgcaattcatgcagatcaagtattaaatagagttacagatgttgtaccaccaattaatgttacaacaacattccgttatccatcaaatcctaatgatattagacctgcaactgattatcaatctgatagttatgatccatcatctgatacaccaatttattcaagattaggacatccaaattcaactagagttgaaaaaattttaagtaaattattagatggtgaagtaattgcatataattcaggtttaagtgcattttttgctgcaattatgtattttaatcctaaaactgttgcaattggtgatggttatcatggttgtcatggtattttaaatttattatcaagaaattataatgttaaaattgttaatttagatcaattagatcaattaaaagaaggtgatttaattcatgttgaaacacctgaaaatccttattcaattgttcatgatattgaatattatgttaataaggctaaatcaattggtgcaaaagttttagttgatgcaacatttgcaccaccaccattatcaaatccttttgattttggtgttgatatgattatgcattcagcaacaaaatattttggtggacattctgatttattagcaggttgtttaataactaaagatccaaaagttaaaattcaattagcaactgatagaattttccttggtactaatattgccaatttagaaagttatttactgttaagaagtttaagaacatatgaattaagaattaaacaacaaagtgaatcagctactaaaattgttaaatatcttgttgaaaataagaataattatccaacattagataaaattcatcattcatcattacaaactgaatcatttgtcttaaagcaaatgaaaggtggtcattcaccagttttcagtattgaattaaatgaaattgaaaaggcaaagagtttaccatctaaattaaaatatttccaacatgcaacatcacttggaggtgttgaatcacttattgaatggagagcagttactgatgctaatgctagaaaaacattacttagagttagtgttggtattgaaaatgttgaagatttaatttcagatttagatcaagctttaagacaataaaatatcattatatagtcattcctatcattattatctacatctataacataacatctatctataacataacataacatctataacaaacaaagtaaaaaggatgattacgtaatattaatataattgaaggctcatctattatgacaagaactttgtcataaatgattgccctgcaggctcagctttcatttctttcacttctttcactcttttcttcttcttctgcccttgacttcactctttcttttgtcttgttctgtagtttatgtgttgtggttggtattgaagagtggttacatgtatttaggaggtttggttgtggattaattgtcatttgattgattttgacgagccacctaaaaagtaaaaaatgctattttcaaagattaattaagtgtgatactcaataacactttgatgattattattggaagatttttttaattttcaaaatgatttaaaacacaataaaataggataaaacaccatatattacgatatattatccaaatataatatttaattacatgaattaatacttatagatactgatattgaaagaagatacaaatgttaatattgcttacgtaaaaaataaatatacatgcatgtaatttatcttaaattagaggttgttgtttatctaatctaataatatacccccctcttctctccttttattacaccctcctttaaacaatgtccaaagtacgcaaatacaaaacaaaaacaaaatctccagcattagaattatttgcagaaaacttagaagatgaattaagagataaaaataggaaaattagtaatgatgaaattgaattttatcaaaattattcaacttctcaattaactttacaacaattcttacaaattcaagatttaaatttagatattggatttatttctgatattccaatcgatttacaattaaataatgcattggaaaataatgtaaataatttattctcaactgatttctataattcattaaatgatattgaattatctacaattgattataaaacatttcataatcatttctcatttaataattcaattgatttatcatttaatcaagaagaaagtagtatcataccaccagataatgttaaaagtttcccatattctgataaaaatttaagatcaggtttagtatataatacaggtggtttcccattacaattagaatggttaccattttcaattaataataaaaaattcttatttatagttacaattgataaaaatccaaatattgatatatcagaattttctaaaaattcttgttgtttaacaattttagaatataataatgattcatttgaaattaataaaaaaattataattgataatctaattaaagaaattgaattttcaatgatttcaaatgataaaaatgaaactttaatgaaattaacattatctaatggatctgttgaaatttggaaaataaatgaatcatttcttttatctaataattctaaatattataaattattatcaggttctcaaaagattataataaataatgataaatcaattaaaataacaacatcaacatttgttacaccaaaaataattatatttggaactaatcatggactaattggacaatattcaattttggaaaataaaattaactatttaatttcaactaaattaccttcaattacatgtattaaatcaacatatccaacaaataaaactgatgattcaattaatttattggtttcaacaacagattttattgattatatgattaatttaccattaacaattaataataagaaaattccattaatgaatagattaaaaatttatagatcatcagttatgaatagagaattaattttcgatagaagttgtacatatattaatagtcttaaaacttttttttcaattgaatggccatgtagtattaaatcatatacaattaaagatccaaaaggtagtaataaatatagaatttcaattgatagagaaatatcatgtttaacaaatttaaaatcatttaaaaataatattttaaataatggatttacattaataacgggacatacaaatggtgtaattagattatgtaattttattgaaatgtcaagaataactgattcaaaacaatatccatattcaattcaattatttcaaatgaaaaagagtaatttacaaaataataataataataaatttttcattaatttaaattatagtgttgataaaaatggtgatgtttcaattaaggataaattaaagaaggataaattagcaaataatacacatttagttaattctaatgatatttgtccaattaagatatcatcaattaataaatcaattgcaagtgcatggggaaatggattaattataattgaagatttaattatatagttttatgtattatgtatattatattaccaataaatattaaatttatttgattttgaatattcatttaaaccaccttttagatctaatgctttataacctttatcaattaaatatttagttgctagacgtgaatcattacccattttacaaacagatactatagttttatcaattggtaatatttcttttaattcattttcatttaatctaattaatttagtatatggtaaattaattaaatttatattatcattttcattaaaagttttcaaattacaaatattaaattgttcaataggtctaacatcaataactaattgatcatcattattgaaagttttcaaattatcaaaatttattctaaatttatcatttaaaatattataattaattgaaccacaaaattgtaaataattagttgatttaataatttcctttgttaatttattacaaatacaatcactttgtttacctctcattttaaaacttttaattgattgtccattattatcattataacctgaatacattaacataattggtttataaggattattatttaaattataataattagttaatattttaattgattcaattgacattaaaacacctactaatccaacacatggaccaataactccatcatctgaacaagttgaaatattttcaggttttgtaggtttagggtgaatacatctataacatggaccattttgataatttaaaataattaattgaccatcagttttaactgatgaagcagaaactaatggtttatttgttacaatacaagtatctgaaattaaatatttagttattggattatcagtacaatctaaaattaaatcataattattgaaaatttcaattgaatttaaattatctaacataattgaatgtttaattattgttaaatttgggttaattaattttaatcttttaaatgcagattctgtcttatataaaccaatagaatttgaatcatgtataatttgtctatgtaaatttgaaatttcaactttatcatgatctaataaaccaattttaccaatacctgaacttgctaaataaagtaaagctgatgaacctaaaccaccacaaccaattactaaaattttagaattttttaaattaatttgactatttaatgaaccaaattcaggtacttgcatttgtctaccataacgagagtattcttcattagttaattccattttgaatagagaggaaggtataccagtatatactacaagaaaagagaaatgtgactaaattatatgaagaaaaattcatgatatacacactctatacaatataatcaaacaactttttgtttaacaaagaagttctttaaataagataattgccatacaccagtaccaattaaaataatgatttgaataatagtccatttagttgaacttgaattaacattttcagaagtatctctaaaagttgcttcctttaatcttaataatgattgttctcttttaatattatttaattttttaattaattcattagttttcaatgtaagatatgaaacatcaccatctcttttactatcaactaaaggttttgcatcaccaacaattaaatcaaataaaattctatgttttgattttttagaccaatttgtatgttttggagttatacaaaatttatgttcaccactatctaatgaagtaaatgtaaaataaccaattggagaatttttctgtgatacaactctatgattattatcaaaagtttcatcaattgtaatttcaacttttaaattattattattttcaacataatcatttaaattatcatcaaattcataaactgcaaatttaccaactgcaattgtatcctttggtaattcttcatagaaacatttagtttcatctgtgttgacgtagaaatggagggcattgactgcagagagcagggcaaagatgagagctgtacagaccttcatgatttggtataggaatcgataccaaaagtatataaagaaagagtgttataaacaaaggttcaaaaacaaagacacgtaaagaataaagagagagagagagagagagagagagaggttgaaattttttatttttattttattttagaaattttttttttcattaggtatattttatagagtaagtttatcagacaagaatggccggaaacagtagaggagcagatgatcctagattcagtaaagtgttctctgatcctagatttagaagtgtgaaaaagaaggatttgaaagttcaattggatgatagatttaataagaaagaattgaaaaaggaatttacattattaaaatcaaatgctaaagttgataaatatggtaggaaagttaaaggtgatgatgtggttgataatttagataagtattatgaagatgaagatgaagaggaggagggagaggaagaagaagaagaagaagaagaagaagaagaagaagaagaagaagaagaagaagaagaggagtcaaaatcagactcagactccgactcagaatcagaattagacactgaagatccacttgcaaaagcaagaggtatggtagagagtgattcatctgaagaagaagaagttgaaattgattcagatatcgaatcagatattgaatcagatattgaaatagaggaaaaaatcccaacttctgatccaacaaatagaattgcagcagttaatttagattgggatcatattaattcaaaagatttatatgcaacctttaattcattcttaccaatggaaggtagtataaagagtgttactatttataaaagtgaatatggtaaggagaaattagcagatgaagaattaaatggacctccaaaggaaatttttaaagcaatacagaaagaaaatgaattggagagtgatgaagaagaagaagaagatgatgatgaagaagaagatatagatttagagaaagcaagtaggaaattaattcaagaaaacaatggagaggatgaaggatttgattcaacagaattaagaaaatatcaattacaaaggttaagatattattatgcagttattgaatttaataatttagaaagttcaattgaaatttataagaaatgtgataatacagaatttgaaagtagtggtaatttctttgatttaaggtatatccctaatgaaatggaatttgaagagaatgatattagagataaatgtaataaattacctaataattatcaaccaattgaattttcaacagattcattaagaaatagtaaacctaaattaacatgggatgaaacaccaattgaaagagttcaaatattaagtaaatcttttaaacaaggtgaattagataatttagatttaaagaattatttagcaagtgatagtgaagatgatgaagagattaatattaataaatataaacaattagttggtaagaaggagagtcataaagaacaggaagaagacaaagatgaaggtgatgttgatattgaatttacatttacaccaggattaagtaataatggtaaaaatgataataatagtaacggtaaggtcatagaggaagaacttacaccaattgagaagttaagaatgaaggagaaagagagaagaaaggctagaaagcaaaaagttaaggaattaaagaaagaagcacataatggtaagaagagtaggggtaagagagatgaagatggagatagagatggagatgaagaagaactccaaattgaggagagaggtagtggtaataagaacaatacaagtgaattagaacattttaacattaaagatattgcaaaacttgaaaagcttaaatctaagaagaataagtttaagaataagagacaaagagagttggagaatgaattagagaaacgtatggagtctagtaaacaagataaattagaagttgatgaacgtttcagtgaaatgattgattctcatgcctttgtaggtggtagtaagttacttcaagatgaaagaaagagaagaaagaagagtaacaagtagttatataggtattatactaagtaggattattattatgtaatggatttttaatttatatagtatatacaggttatttatctctgtaattaagtatagtatacgatatgggtaatacaagtagtgttaatgaagataaggtgatgttacagagtgataggagtaataggaaaaatgttaagaagttgttttggaaacatgttaggagtaatatgagtaatattgaattaattacaatttcaacattttcatttggatgtattaaagaattaaatgatacaattacatatgaagaattaatgaataaattaggtatgtctattatacttgatgatgaaagaggtgatattgtttataagatattaaaagggttgagtaattggccattaattagtgatttccatcatagtggggatagacaatatgatgaatttacattaaatgaattgattattatagtttatttattatattgtaaaggatttaagaaagttggattagatgatgaatatgttataagattaatatttaaattaattaataagaatagtgaaagtatagagaaggaagatgaaattgatataatatttaataaaaagaagacaattttatggaatttaatgccaattatacaatcatatgataataatgagaatgaagaattgggagttaatgaaatggaaacattaattaaatttttattaccattatcaattaattcaatttataataaatcatttgaattaaaatataaaattgaaaataggaatatattaagatgttttattaatgggaatgggaatgggaatggaaacattaaatatcaatcatttattaaaacatatcgtgaaactactccattattgattaatccaatatatgaaatattcaattcgatgatggaaagtaataatgaaataaatacaaataccaaaccagaatataaaattctaacattacagaaaatagcacagatatcaacagttattgatattaaatcattagaaatgaaatcaaaggcaatatatagaggatcaagggatggattttccattaattcatttacaatgaaagtagttgataaacaaaggaaaggtaaaatactatgtttatcaggtaaggatacaaagatagtggtaattacagatggtgaatgggaatcaagtcatagaggacatcgagttagttgtttagaggagagtatagtggtaatatccccacaacagagagtaataagtgataataataataataatactatcattataggagacacttccctaccgtgtactcctatcatcaccatggacaacacactcgagagagcagtgattgacggtgtatctgtaccacttgcagaggtagaagtaatataataaagtaatttataaataaaccgttggaattcgcagagaataaagtgtatttcccccatttaattattattaacttgttcatctgcttttaagatctctattgtatactgtatatagtgtatatactgcattgctacttaactgtaacgggatattggttggctgtttattctgctattttacctctttaaagatttaactatttaactctttgaataaaggttaaataaagtacattcaataaaggaaaggaaaggtcagatcacatatcattctatgatggttgatgaaagtaaagattctattgatcctgaaatggatcgtaataatagtgctagtattatctcaatatcatcatcaacaacaacaacaactaatgcaactgcaacactcagaaaatctcaacctgcttcatttatacgtaaattatattcaatgttagaggaacctacaatgaataatttaatttggtggaaatctgataattcaaacttctacgttcgttcaggtgaagaattcactcaatctttatcaaaatattttaaacatgcaaatatttcatcctttattagacaattaaatatgtatggtttccataaagttgataattctcatattgataatgaaattcctaataataataataatttaaatgataaatcatcatcatcatcattatcattaatatcattatcattattaaataattcaaaatcaaagataaaatcaaaatctttaaattctaataattcattaatttgggaatttaaacatagttcaggtatttttaaaaggggtgatttagatggtttattgaaaattaaaagaagatcttttaaaaatcattcaaatgataaagatagtaataattttaaattaacctatgatatacctcctaatttacccgttgaaaatgaaatttataattatcaattagataataataataataatcaaaataataatcaaagtacacaaaatcaacccccgtatcgtgtacatccatctttaccaatacatgattaccaattagatgataatcaatctcaatctcatattcaatattcaaatccttataatagtcaacaagattcatataatcaatcaaatatgattaatcctcaaattaaacaagaaaataataataataataataataataataatactactactactactactaataataataatccacatccacaaccaccaccccttccaccaccacaaccttcttatcatcttcaatataatgttcaatatcctcctcaatattctcaacatcctccattacctgtacaatatcattcaaatgtttcaacagattcaacaattttccatcaattaaaacaaaatcaacatgcaataattgaacaaaatcctaatcctactcaaacatcaaattcaacacctgcaattataaatccaactactaacaccaatccaaatcaaacctccaataataataataccaattcaaataccgattctaattcaaatccaaatcaaaatcgaacattatctcaaactcaacctgaaaattcagatcaaacaccaaatagtcaaaataatacaaatacaacttcaaataattcaacatctgctaatcaaccaccaaataacaataataataccaacacaaataacaatcgtgaatttgattatcaagataataatgataaatttaatttattatttcaaagaactgatgatttaatgaaatataatgaaatttataaagaagaaattagtaatcttaattatgattttataactatattagatttaattaaagatcaaattaatgattcaggtttaagtaaaatgcaaataattacaaatattgaaagtttaagatctaaatttttacaaagaaatgctaatagggatatgaatattagatatttaatgtatcaaacaaattctttccaatataattcatttgaattacaaaataattcaaatattcaaagtattaatagtcctcaaataccaaatcaattattcccaaatcaatatccaattaatcatattagacaaaatagtgggaatttatcaggctttattaatacaaatcaaagtattaattatccaagacaaccttcaaatgtttcattaacaagtaatccttattttaattcaggttatattcaagtaaatcattcaaataatttttatgattatcctcaatataatcaacaattacaaaatccaccatcacaagtttcaactcctatttattcaactagatttgatcaacaacaacagcaacctcaacctcaatctcaacttccaaatcaacaacaaaattatcatcaatcacatcaagcttcatcattagctattgaacaaactaatcatgatgataaacaatcacaatcacaatcacaatcaagatctgaatcacaatcacaatctcaaatgtcaaataatgatgataataggaaattaccaaaagatgaatcaattgaatcatcacatttaatacctaaacatccatcaatgaatagaagttcattagttagaattccaatttataaccaaaataatattaaatcaacacaaatcggtccaacttctaatccaactaattataatgttccatttcatacatttcaaaaaaataattcaaataattctaatgtttcaaataattcaattcttaataataataataataataataataaccctacacaaaattctgctaatgattcaccattttctcaaaaagatgtaagatatagtatatctgcatcatccaatagatcaagaaatcaatctgtttatgatccattacaatcattaccatatcattcacaacaacaacaacaagcaccaccaccaccaccaccaccaccacaaaattattctgtcaataataatttaacaccagttccaccaccattacaatattatcaatcaacatcaacaaattattttaatattgatccaaataatttaagtagacaatattcagcgagtcaaatgtattcacctgttggtattattaataataatacaacatcaacaagtgcaactacagttacaactaataattcatcaactattaataaaactgaagaatcagatattgataaagatactaaagtaaatactaatactaataccaataataatattcttaataataataataaatctaaaaagcaacataataataattggtatccaatatataaaattaatgaatctggtgtttattcaacaaagagtagtagaaatggtagttttaataatatgaattttaatatgagtggattaaatcaaagtagtacaaataatatagatagaaataaaaaggatgaaaatgaaaatgaaaatgaaattgaaaataatgataatgaaaatgataaagatgacgttaaggagttgaaaacaagtaatgatgaagtaaagaaagataatgatgaaaatgaacatggaaatgaaactgttaatttggataatgataataaagaattgaaaaataatagtaaaaaactttcagtttcattgatcttaaacaatactaaacatgatattgatttagatggtgatgataccactaataaacgaattaaaatataatataatatgatatgatatgatatgataggatatatattttgatatagaaattttagatttgcttttttttatgtaatatactgttttttaattgtaattttagaagttaaattttacatggaataactgattatattagttttaaaaataagtttatagaaagaaaaaataagttagataaattatattattattattatttatcaatatatttaatttctggatcattagttggtaataaagtttctttagaatttcttgcgtgttcaagttcttttaagtagtcataacctgacaatacttcaattttatctattaataattcaaatggaccgaatttaccatcagcaattgataaaccaatagattttattctatccttttcaaattcagattgatattgaacttgcacggtgcctcctatttgtaagtacaaattcatttaaattaataaataaattttcccaaattggattattagaagtgttatcaccattactatttgtaaataatctatgttgatataaatcagttcttgacattgtatcagtttgaatattaaccataaattttctattaggtgttaaattcataactcttaaatgtaaaacttcaaatggtgaccaatcccaccaaaaatttgcttgacttttaaataaataaaatggtttaaattgtgcatttggatcttgaattctattctttgttttaaacattgcccaaccactttgtctaactttagtttcacctcttggtaatgtttgattaagattaccatggaaatgtgcaattaatttactttcatttgatgctctataaggttcaaaatatgcagttgaaaatccacctaatgttgcatctgaagttgtttgaattcttgggaatgtctctgccttagaaaagtctagaagtgaaagtttagaaggtctctctgccgctgagagatgtttacctataaacttaaacatggtgtcttgtccaaagtaaaagaaaagtaaaagtaaaagaaaggtataaagtacttaataaattacttctcgacaagtattaaaattcatgttgttattctatttactatactttatcttattgaaatatcttatactacacgtagaacagacatcatggaacttaaacaactgaggaggcatctaccgaagatgttctttagattattaccacttcatacgggggtagaacttattttcatcttcacagctataaataaaatgtctggtgtctatggacttctttcattattcacaaatcatccaataaatttcattcaatggatgtattatctattaaacacattatttgttattttaacaatgatatgttatacttatttaaagaagactgcttcattttcattatctaatacatcacttaatacagatgaaaatatgataacaattaaatttattgctgcatttattgtattttactttattgatttctttacaggtaatctgtttatggtttatttggctaatctttggcttacagaggaatatttagaaactgattcatcatcattatcatcatcatcatcatcatcatcttcatcaattaagaaaactatcagtcatatgttaaataagagagtttctgatgtattatcagaacaaagtgcaagtgaaggttacgaaatttttgtttgtgttgttactatcttaattagtgaatgtttccgtctatatttcatggcaattgttttaagttactatttacgtttgcgtaagagaatctcacgtacatgttttggatttggaactagatttgttgatttattagataaattgaaatgatttatgaatggataaaaataataataaaattagaattagaattatatattgtagaaataactgtatctcttttatagataatcaaatgttaaggtattatccgtatagtaagtaatccaccatagtaaaaaaaattttaaatccttaacatgaaattttttttttcaatgttaaatatactttaatcatcttttatagaataactagctataatgtcatcatcagactactcagatgacgaaggaaatggtcaaacattcaataatagtgtccacacatctaatgcaagagaaaaggcagatattttggaacgttattctgataaaattaatcttgatatgtttgctaaacatagaattacaagagataaagcattacgtgcaactgttaatcaagttttagatccaagaactttaagattccttggtaaaattttcaataatggtacaattactaaaattaatggttgtgtatcaacaggtaaagaagcaaatatttattattcagaaaatgaacaatcaggtaaagaatttgcagttaaaatttataaaacttcaattttagttttcaaggatagaacaagatatgttgtcggtgaacatagatttggtgaaaaacaatctaaaaatccaagacaaatggttaaaaattgggcagagaaagaatttagaaatttgaaaagattacattctgaacctttaattaattctcctcaacctattgaattaagagaaaatattttagttatggaatatttaacaattggtaaaggtgaaccatcaccaaaattaagagatcatgattttaaagatttaaatgaaattattcattattatcatgaaatgttaatgttaatgagattattattccaaaaatgtagattagttcatgctgatttaagtgaatataatacaattgtacatcaagataaattatatgtttttgatgtttcacaatccgttgaaccagatcatccaatggcaatggatttcttaagaatggatattaaaaatgttaatgatttttttagtagaataaagaaaattaatgtttatcctgaacgtgaaatatttaaatttattataacaccacatgatatcttatttaaagattttgaacatgataataaagatgatgaagaaactaaagaattcttattagattatttaaatactttatcattaaaatcatccgaggatgatgaattcaatgatgaagttttcagaagtttacatttggttagtagtttacataatattgaagaaagagattttaataaatttagtaatggtgatatagatacattagttgatttagtggggagtgtgaaaataaataaagatgaaggagaaaatgcagaagaggatgaagatcataacgaagaagattctgatgaggaagacgatgatgatgaagataattctgacgatgaattttatagtgatgatgaaaggaaaaataaaccaaacaatttaaaaagattccaagataaagatgaaaagaaattacataaacaacaagttaaagaagctgctagagaaaatcgtaaatctaaaatgaagaaacatgttaagaagaagttggttaaaaagggtaagaaatgattttgttaaatttatgtctataaatatttcttgtaagtaatgtatacagtgttagtttttctaaataggttaattaaaaagttaaatttaaatcatattttcattcttttgttagcaaaatttgaatttttagatttaatatatttcatcatttcactatagtcattatcaatcatattgaaatctgcctctgaatattcagtaaaatcaaatgttatatcacattcaacgtcaacatcaacatcatctttctcgtcatcatcaattctagtatcgaaaaatccattttctattaattgattcaaattaatttcatcatcacatgaaatatatgacctttgatcaggaattacattctcttgtttattaattacaaattgttgatattctggtgcaattaatttcaaattaataactaaaaagccctcacttttctctctcatttgattctttattaatgataaccaattaggtctattgttaccttcattacctgtttcatttctacattttgcctgtgcctcttttaaaaatacatataagtatttgtaatcagtatatttacatgacattaaatctaaaaatgtttgtgatttaacatatgatatatccatgaaaaatttggatttatctaaatttggttccttgttcatcatatattttctcaatgtaagatatttagtaaaatatttaatcattgattcttccttaatacaaatattctctgattctatctcaatgtataatgcgtcattcataaacttaaaacaattaatgtctaaatttaaatactctccaaattgtggtaatggggtactagttaaagctaaataacctatcaataaacaagttatacatgcaattgatcttttaatattttcattttcatcaatattattatttccattgaattcatcatcttctaattgacgtttatatttactttgaaacttttgaaattcttttttaacaatttcattttcaatatttagaccagctaatgatttaacatataaaatttctgagtttaagaaagactcaattctctctatcattatgtttaaactgaataatcctaatattttacatccaatgaatttatccttaagtaaaactggatgaacataagtgtatttttcaggattgaaaaaaggtttcattatgtatgatttttttcttaaaaaatagtatagggtgggataatacattttttcaataatttttcttaattctccagttttagtagcctgaccaagtttcaaagtgaaattttcatcatttttgttggttaatttgcttaagaaacttaatcttatgatatatagtaaagattgaaatataacttttctccttgatggtttgaaaaatgtaagtgtcttagaggatttatcaaaattacaaatagaaaatgtaaatattgtttgtaaaggtgtaaattctgaggtttcttgagttgaaatattaatgaaaagattacttatcaaatcccatagtttcaataaatcatcattttcagtattggttgtaatattgaatttaaataaaaaagtttctattttacattttctcataataagtaatagaagtttttcaataatgaatttttgtgaagaattaaataatggtttatagttaggtgattcacaaaaactcaaaattaatttgtcttcaacattgtatgccataagaagtataatgatagctttggaaatgttttcagcatataatctgattttattattgttgcttagtttaacaaaattaaaagaatgattgcttgtttctgataaatatagtttcataactttagacttatgaaatgtaaaattttcattatatttataagcttttgaatatattgttattagatctgtcaaagaatcagttaaaaaaatctgcattttaataaaattcgaaacaatcttagagtgattcagataataataataatcctttatttctaatttgttaataaatttgacaatataatttgatttaaacatttcatcatgtgaagatatctttgaaactttgtattgtttgtaatttttcgaagaagattctaatatttctgactttagcttgttccgtttaatataattttcactcattaatacactcatcattcctcttgtaaataattgactacttgattctgaaatataaaatttagttataattttaatgtcttgtccatgaatagaattgatatgacgcagggggggtatagtgaagtaggtcgcagggggggtatagtgaagtagagaagtgaagtagtgaagtaggtggcaggggggggtatagtgaagtaggtcgcagggggggtatagtgaagtagatcgcagggggggtaatgtgaagtagatgtgaagtagtgaagtagatcgtgaagtagatcgcagggggggtatagtgaagtagtgaagtgaagtagtgaagtagtgaagtagatgtgaagtaggtcgcagggggggtatagtgaagtgaagtaggtcgcagggggggtatagtgaagtagatgtgaagtagtgaagtagtgaagtagtgaagtgaagtagtgaagtgaagtgaagtagtgaagtagatcgcagggggggtatagtgaagtagggggggtatagtgaagtagggggggtatagtgaagtagtgaagtagtgaagtaggtcgcagggggggtatagtgaagtagtgaagtagatcgcagggggggtatagtgaagtaggtcgcagggggggtatagtgaagtaggtcgcaggggggtatagtgaagtaggtcgcagggggggtatagtgaagtaggtcgcagggggggtatagtgaagtaggtcgcagggggggtatagtgaagtaggtcgcagggggggtatagtgaagtaggtcgcagggggggtatagtgaagtaggtcgcagggggggtatagtgaagtaggtcgcagggggggtatagtgaagtaggtcgcagggggggtatagtgaagtaggtcgcagggggggtatagtgaagtaggtcgcagggggggtatagtgaagtaggtcgcagggggggtatagtgaagtaggtcgcagggggggtatagtgaagtaggtcgcagggggggtatagtgaagtaggtcgcagggggggtatagtgaagtaggtcgcatggggggtatagtgaagtaggtcgcagggggggtatagtgaagtaggtcgcagggggggtatagtgaagtaggtcgcagggggggtatagtgaagtaggtcgcagggggggtatagtgaagtaggtcgcaggggggtatagtgaagtaggtcgcagggggggtatagtggtcgcagggggggtatagtgaagtaggtcgcagggggggtatagtgaagtagatgtgaagtaggtcgcagggggggtatagtgaagtaggtcgcagggggggtatagtgaagtaggtcgcagggggggtatagtgaagtagatgtgaagtaggtcgcagggggggtatagtgaagtaggtcgcagggggggtatagtgaagtaggtcgcagggggggtatagtgaagtaggtcgcagggggggtatagtgaagtaggtcgcagggggggtatagtgaagtaggtcgcag
